(19) United States
(12) Patent Application Publication
(10) Pub. No.: US 2026/0001915 A1
(43) Pub. Date: Jan. 1, 2026

(54) METHODS FOR TREATING OBESITY WITH AN MC4R AGONIST

(71) Applicant: RHYTHM PHARMACEUTICALS, INC., Boston, MA (US)

(72) Inventors: Bhavik P. Shah, Winchester, MA (US); Patrick Willem Kleyn, Marlborough, MA (US); Maria Cecilia Scimia, Boston, MA (US); David Pell Meeker, Lincoln, MA (US)

(21) Appl. No.: 18/993,104

(22) PCT Filed: Jul. 12, 2023
(86) PCT No.: PCT/US2023/070084

§ 371 Date: Jan. 10, 2025

Related U.S. Application Data
(60) Provisional application No. 63/388,580, filed on Jul. 12, 2022.
(60) Provisional application No. 63/426,610, filed on Nov. 18, 2022.

(51) Int. Cl. C07K 7/64; A61K 38/00; A61P 3/06

(52) U.S. Cl. CPC C07K 7/64; A61P 3/06; A61K 38/00

(57) ABSTRACT

The disclosure is related to a method of treating a non-genetic obesity (e.g., hypothalamic obesity) in a subject using a melanocortin-4 receptor (MC4R) agonist.

### CLAIM OF PRIORITY

[0001] This application claims priority to U.S. Application No. 63/388,580, filed Jul. 12, 2022; and U.S. Application No. 63/426,610, filed Nov. 18, 2022; the entire contents of each of the foregoing applications are incorporated herein by reference.

### BACKGROUND

[0002] There is a need for treatment of obesity and obesity-related disorders, including non-genetic obesity and related disorders (e.g., hypothalamic obesity).

### SUMMARY OF THE INVENTION

[0003] The present disclosure features, inter alia, treatments for obesity, e.g., a non-genetic obesity, e.g., hypothalamic obesity, with a compound (e.g., an MC4R agonist) or composition thereof. In some embodiments, the MC4R agonist is a compound of any one of Formulas (I), (II), (III), (IV), (V), (VI), (VII), (VIII), (IX), (X), (XI), or (XII), (e.g., as described herein) or a pharmaceutically acceptable salt thereof. The MC4R agonist, e.g., a compound of any one of Formulas (I), (II), (III), (IV), (V), (VI), (VII), (VIII), (IX), (X), (XI), or (XII), or a pharmaceutically acceptable salt thereof, may be provided as a composition (e.g., a pharmaceutical composition) with a pharmaceutically acceptable excipient. In an embodiment, the pharmaceutically acceptable excipient comprises a polyethylene glycol (e.g., a modified polyethylene glycol) or a lipid (e.g., a neutral lipid or a phospholipid). In an embodiment, the pharmaceutically acceptable excipient comprises a modified polyethylene glycol. In an embodiment, the pharmaceutically acceptable excipient comprises a lipid, such as a neutral diacyl lipid or a phospholipid.

[0004] The MC4R agonist or composition thereof may be provided in a unit dosage form. For example, the unit dosage form may comprise between about 0.01 mg to 100 mg of the MC4R agonist. In an embodiment, the unit dosage form comprises between 0.1 mg and 100 mg, e.g., between 0.1 mg and 50 mg, 0.1 mg and 25 mg, 0.1 mg and 10 mg, 1 mg and 100 mg, 1 mg and 50 mg, 1 mg and 25 mg, 1 mg and 10 mg, 5 mg and 100 mg, 5 mg and 50 mg, 5 mg and 25 mg, 5 mg and 15 mg, or 5 mg and 10 mg.

[0005] The MC4R agonist or composition thereof may be administered to a subject daily, weekly or monthly. In an embodiment, the MC4R agonist or composition thereof is administered daily, e.g., once daily, twice daily, or three times daily. In an embodiment, the MC4R agonist or composition thereof is administered weekly, e.g., once every week, once every two weeks, once every three weeks. In embodiments, the MC4R agonist or composition thereof is administered daily over a period of at least 3 weeks, e.g., at least 3, 4, 5, 6, 7, 8, 9, 10, 11, 12, 13, 14, 15, 16, 17, 18, 19, 20, 21, 22, 23, 24, 25, 26, 27, 28, 29, 30, 31, 32, 33, 34, 35, 36, 37, 38, 39, or 40 weeks or more, or at least 1, 2, 3, 4, 5, 6, 7, 8, 9, 10, 11, or 12 months or more, or at least 1, 2, 3, 4 years or more.

[0006] In embodiments, the method comprises administering the MC4R agonist or composition thereof in a unit dosage form suitable for injection, e.g., subcutaneous injection, to the subject. In embodiments, the unit dosage form is disposed within a delivery device, e.g., a syringe (e.g., prefilled syringe), an implantable device, a needleless hypodermic injection device, an infusion pump (e.g., implantable infusion pump), or an osmotic delivery system. In embodiments, the MC4R agonist is administered subcutaneously, e.g., by subcutaneous injection.

[0007] In embodiments, the subject is obese, e.g., severely obese. In embodiments, the subject has early onset severe obesity. In embodiments, the subject is hyperphagic. In embodiments, the subject experiences severe hunger. In embodiments, the subject has a body mass index (BMI) greater than 25 kg/m² (e.g., ≥25, 30, 31, 32, 33, 34, 35, 36, 37, 38, 39, 40, 41, 42, 43, 44, 45, 46, 47, 48, 49, 50 kg/m² or greater) prior to administration of the MC4R agonist, e.g., at the time the MC4R agonist is prescribed, or at the time of the first administration. In embodiments, the subject has a body mass index (BMI) greater than 35 kg/m² (e.g., ≥36, 37, 38, 39, 40, 41, 42, 43, 44, 45, 46, 47, 48, 49, 50 kg/m² or greater) prior to administration of the MC4R agonist, e.g., at the time the MC4R agonist is prescribed, or at the time of the first administration. In embodiments, the subject has a body mass index (BMI) greater than 40 kg/m² (e.g., ≥41, 42, 43, 44, 45, 46, 47, 48, 49, 50, 51, 52, 53, 54, 55 kg/m² or greater) prior to administration of the MC4R agonist, e.g., at the time the MC4R agonist is prescribed, or at the time of the first administration. In embodiments, the subject has a body mass index (BMI) greater than 45 kg/m² (e.g., ≥46, 47, 48, 49, 50, 51, 52, 53, 54, 55 kg/m² or greater) prior to administration of the MC4R agonist, e.g., at the time the MC4R agonist is prescribed, or at the time of the first administration. In embodiments, the subject has a BMI higher than the 85-95th percentile prior to administration of the MC4R agonist or composition thereof, e.g., at the time the MC4R agonist is prescribed, or at the time of the first administration.

[0008] In embodiments, the subject has failed one or more previous therapies, e.g., exercise, diet, or behavioral therapies, prior to administration of the MC4R agonist or composition thereof, e.g., at the time the agonist is prescribed, or at the time of the first administration.

[0009] In embodiments, the subject has a lower body weight after administration of the MC4R agonist or composition thereof than before administration of the agonist.

[0010] In embodiments, administration of the MC4R agonist or composition thereof results in a reduction of weight in the subject compared to the weight of the subject before treatment of about 1 kg to 3 kg after 1 week of treatment, or about 1 kg to 6 kg after 2 weeks of treatment, or about 2 kg to 12 kg after 4 weeks of treatment, or about 4 kg to 24 kg after 8 weeks of treatment, or about 8 kg to 48 kg after 16 weeks of treatment. In embodiments, administration of the MC4R agonist or composition thereof results in a reduction of BMI by about 1%, 2%, 3%, 5%, 6%, 7%, 8%, 9%, 10%, or more, e.g., by at least 2, 3, 4, 5, 6, 7, 8, 9, 10, 11, 12, 13, 14, 15, 16, 17, 18, 19, 20 weeks or longer.

[0011] In embodiments, administration of the MC4R agonist or composition thereof results in no detectable/significant decrease in resting energy expenditure (REE) in the subject, e.g., over a period of 24 hours, one week, or 30 days or longer, e.g., as compared to a control REE (e.g., the REE in the subject prior to treatment or a predetermined REE, e.g., in subjects of similar pre-treatment BMI, e.g., when expressed as REE per kg of lean body mass).

[0012] In embodiments, administration of the MC4R agonist or composition thereof results in a reduction in food intake of at least 5 kcal/kg/day, e.g., 5, 10, 20, 30, 40, 50, 60, 70, 80, or 90 or more kcal/kg/day. In embodiments, the reduction in food intake is relative to the food intake at baseline. In embodiments, the baseline food intake is at least 100 kcal/kg/day, e.g., for a pediatric subject at about 1 year of age. In embodiments, the baseline food intake is at least 40 kcal/kg/day, e.g., for a pediatric subject, e.g., in late adolescence.

[0013] In embodiments, administration of the MC4R agonist or composition thereof results in a reduction in waist circumference of the subject compared to a control (e.g., the waist circumference of the subject prior to treatment), as measured 1, 2, 3, 4, 5, 6, 7, 8, 9, 10 weeks or more after initiation of treatment.

[0014] In embodiments, administration of the MC4R agonist or composition thereof results in no detectable increase in blood pressure (e.g., diastolic and/or systolic blood pressure) of the subject compared to the blood pressure of the subject prior to treatment, as measured 1, 2, 3, 4, 5, 6, 7, 8, 9, 10 weeks or more after initiation of treatment. In embodiments, administration of the MC4R agonist or composition thereof results in a reduction in blood pressure (e.g., diastolic and/or systolic blood pressure) of the subject compared to the blood pressure of the subject prior to treatment, as measured 1, 2, 3, 4, 5, 6, 7, 8, 9, 10 weeks or more after initiation of treatment. In embodiments, administration of the MC4R agonist or composition thereof results in a reduction in systolic blood of the subject of at least 3 mmHg (e.g., at least 3, 3.5, 4, 4.5, 5, 5.5, 6, 6.5, 7 mmHg or more) compared to the blood pressure of the subject prior to treatment, as measured 1, 2, 3, 4, 5, 6, 7, 8, 9, 10 weeks or more after initiation of treatment. In embodiments, administration of the MC4R agonist or composition thereof results in a reduction in diastolic blood pressure of the subject of at least 4 mmHg (e.g., at least 4, 7, 7.5, 8, 8.5, 9, 9.5, 10 mmHg or more) compared to the blood pressure of the subject prior to treatment, as measured 1, 2, 3, 4, 5, 6, 7, 8, 9, 10 weeks or more after initiation of treatment.

[0015] In embodiments, administration of the MC4R agonist or composition thereof results in a reduction of hunger in a subject. The reduction of hunger may result in a reduction of food intake, decrease in resting energy expenditure (REE), reduction of weight, reduction in waist circumference, and/or reduction in blood pressure in the subject.

[0016] In embodiments, the subject is a mammal, e.g., a human. In an embodiment, the subject is an adult (e.g., 18 years of age or older). In an embodiment, the subject is a pediatric subject, e.g., a child.

[0017] In embodiments, the method further comprises acquiring knowledge of the genotype of the subject, e.g., acquiring knowledge of the genotype of an MC4R pathway agonizable gene, e.g., a gene listed in Table 1. In embodiments, the knowledge is acquired directly, e.g., from a sample (e.g., a blood, serum, urine, or tissue (e.g., biopsy) sample) from the subject.

[0018] In embodiments, the MC4R agonist or composition thereof is administered in response to the detection of a predetermined sequence, e.g., a mutation, MC4R pathway agonizable gene, e.g., a gene listed in Table 1. In embodiments, the predetermined sequence, e.g., mutation, is detected in a nucleic acid by a method chosen from one or more of: a nucleic acid hybridization assay, an amplification-based assay, a PCR-RFLP assay, real-time PCR, sequencing (e.g., DNA sequencing, e.g., next generation sequencing or Sanger method sequencing, bisulfite sequencing, or pyrosequencing), screening analysis, FISH, spectral karyotyping or MFISH, comparative genomic hybridization, in situ hybridization, SSP, HPLC, or mass-spectrometric genotyping. In embodiments, the predetermined sequence, e.g., mutation, is detected in the subject. In embodiments, the predetermined sequence, e.g., mutation, is detected in a nucleic acid molecule or a polypeptide in a sample from the subject. In embodiments, the sample comprises cells from a blood, serum, urine, or tissue (e.g., biopsy) from the subject. In embodiments, the method comprises acquiring knowledge of the genotype of the subject, e.g., acquiring knowledge of the genotype of, e.g., of a mutation in a gene listed in

[0019] In some embodiments, the compound is a compound of Formula (I) or a pharmaceutically acceptable salt thereof. In some embodiments, the compound of Formula (I) is Ac-Arg-c(Cys-D-Ala-His-D-Phe-Arg-Trp-Cys)-NH₂ (SEQ ID NO: 140) or a pharmaceutically acceptable salt thereof. In some embodiments, the compound is a compound of Formula (II) or a pharmaceutically acceptable salt thereof. In some embodiments, the compound of Formula (II) is Hydantoin(C(O)-(Arg-Gly))-cyclo(Cys-Glu-His-D-Phe-Arg-Trp-Cys)-NH₂ (SEQ ID NO:148) or a pharmaceutically acceptable salt thereof. In some embodiments, the compound of any one of Formulas (I), (II), (III), (IV), (V), (VI), (VII), (VIII), (IX), (X), (XI), or (XII), is formulated as a pharmaceutical composition.

[0020] Unless otherwise defined, all technical and scientific terms used herein have the same meaning as commonly understood by one of ordinary skill in the art to which this invention belongs. Although methods and materials similar or equivalent to those described herein can be used in the practice or testing of the present invention, suitable methods and materials are described below. All publications, patent applications, patents, and other references mentioned herein are incorporated by reference in their entirety. In addition, the materials, methods, and examples are illustrative only and not intended to be limiting. Other features, objects, and advantages of the disclosure will be apparent from the description and drawings, and from the claims.

### BRIEF DESCRIPTION OF THE DRAWINGS

[0021] FIG. 1 is a graph of the percent change in body mass index (BMI) from baseline of five subjects during a period of approximately five to eight months. These subjects participated in a long-term extension study investigating the efficacy, safety, and tolerability of an exemplary MC4R agonist, SEQ ID NO: 140, for treatment of hypothalamic obesity.

### DETAILED DESCRIPTION OF THE INVENTION

[0022] The present disclosure is based at least in part on the discovery that obesity, specifically a non-genetic obesity including hypothalamic obesity and other related disorders, may be treated in a subject by administering a therapeutic agent targeting the melanocortin 4 receptor (MC4R) pathway, e.g., an MC4R agonist. In an embodiment, the subject has hypothalamic obesity. In an embodiment, the subject has been identified as having or diagnosed with hypothalamic obesity. In an embodiment, administering an MC4R agonist to a subject leads to significant weight loss, decrease in hunger, and/or an increase in energy expenditure in the subject. Exemplary MC4R agonists, as well as related formulations and methods of use are described in further detail herein.

### Definitions

[0023] As used herein “about” and “approximately” generally mean an acceptable degree of error for the quantity measured given the nature or precision of the measurements. Exemplary degrees of error are within 20 percent (%), typically, within 10%, and more typically, within 5% of a given value or range of values.

[0024] “Acquire” or “acquiring” as the terms are used herein, refer to obtaining possession of a physical entity, or a value, e.g., a numerical value, or knowledge of (e.g., knowledge of the sequence or mutational state of) a genotype or a nucleic acid or polypeptide, by “directly acquiring” or “indirectly acquiring” the physical entity, value, or knowledge. “Directly acquiring” means performing a physical process (e.g., performing a synthetic or analytical method) to obtain the physical entity, value, or knowledge. “Indirectly acquiring” refers to receiving the physical entity, value, or knowledge from another party or source (e.g., a third-party laboratory that directly acquired the physical entity, value, or knowledge). Directly acquiring a physical entity includes performing a process that includes a physical change in a physical substance, e.g., a starting material. Exemplary changes include making a physical entity from two or more starting materials, shearing or fragmenting a substance, separating or purifying a substance, combining two or more separate entities into a mixture, performing a chemical reaction that includes breaking or forming a covalent or non-covalent bond. Directly acquiring a value or knowledge includes performing a process that includes a physical change in a sample or another substance. Examples include performing an analytical process which includes a physical change in a substance, e.g., a sample, analyte, or reagent (sometimes referred to herein as “physical analysis”), performing an analytical method, e.g., a method which includes one or more of the following: separating or purifying a substance, e.g., an analyte, or a fragment or other derivative thereof, from another substance; combining an analyte, or fragment or other derivative thereof, with another substance, e.g., a buffer, solvent, or reactant; or changing the structure of an analyte, or a fragment or other derivative thereof, e.g., by breaking or forming a covalent or non-covalent bond, between a first and a second atom of the analyte; or by changing the structure of a reagent, or a fragment or other derivative thereof, e.g., by breaking or forming a covalent or non-covalent bond, between a first and a second atom of the reagent.

[0025] As used herein, the term “functional,” as applied to an allele, e.g., of a MC4R pathway agonizable gene, refers to an allele having, e.g., at least 5, 10, 20, 30, 40, 50, 70, or 80% of the activity of a reference allele, e.g., a wildtype allele.

[0026] As used herein, the term “nonfunctional,” as applied to an allele, e.g., a MC4R pathway agonizable gene, refers to an allele which has less than 5, 10, 20, 30, 40, 50, 70, or 80% of the activity of a reference allele, e.g., a wildtype allele. In an embodiment, a nonfunctional allele is an allele of the gene that is other than a functional allele, as the term functional allele is defined herein. By way of example, in an embodiment, if a functional allele has at least 20% of the activity of a reference allele a nonfunctional allele is an allele with less than 20% of the activity.

[0027] As used herein, the term “MC4R pathway agonizable gene” refers to a gene associated with a phenotype which can be modulated, e.g., ameliorated or lessened, by modulating MC4R, e.g., agonizing MC4R, e.g., with an MC4R agonist. In an embodiment, the phenotype is hyperphagia, appetite, unwanted appetite, obesity, weight, body mass, or a metabolic syndrome (e.g., diabetes) and the phenotype is, e.g., modulated, e.g., reduced or ameliorated.

[0028] In an embodiment, the term “MC4R pathway agonizable gene” does not include the melanocortin 4 receptor (MC4R) gene. In an embodiment, the term “MC4R pathway agonizable gene” does not include POMC In an embodiment, the MC4R pathway agonizable gene does not comprise any one of POMC, Proprotein Convertase Subtilisin/Kexin Type 1 (PCSK1, also called PC1/3), MAGE-like-2 (MAGEL2), leptin receptor (leptin-R), leptin, 5-hydroxytryptamine (serotonin) receptor 2C, G protein-coupled (5-HT2c receptor), nescient helix loop helix 2 (NhHL2, also called NSCL2), pro-hormone convertase, carboxypeptidase E (CPE), and single-minded 1 (Sim1). In an embodiment, the MC4R pathway agonizable gene does not comprise any gene disclosed in WO2013/102047 or WO 2017/059076, the full contents of each of which is incorporated herein by reference in its entirety.

[0029] In an embodiment, at least one of the MC4R alleles is functional, e.g., it has at least 5, 10, 20, 30, 40, 50, 70, or 80% of the activity of a reference allele, e.g., a wildtype allele, e.g., as measured by a functional assay. In an embodiment, one of the MC4R alleles is functional. In an embodiment, both MC4R alleles are functional. In an embodiment, the subject is heterozygous at the MC4R gene and both alleles are functional. In an embodiment, the subject is homozygous at the MC4R gene for a functional allele.

[0030] In an embodiment, both MC4R alleles are nonfunctional. (A nonfunctional allele is an allele which is not functional, as functional is defined herein.) In an embodiment, the subject is heterozygous at the MC4R gene and both alleles are nonfunctional. In an embodiment the subject is homozygous at the MC4R gene for a nonfunctional allele.

[0031] In an embodiment, at least one allele of an MC4R pathway agonizable gene other than MC4R is functional, e.g., it has at least 5, 10, 20, 30, 40, 50, 70, or 80% of the activity of a reference allele, e.g., a wildtype allele, e.g., as measured by a functional assay. In an embodiment one allele of an MC4R pathway agonizable gene other than MC4R is functional. In an embodiment both alleles of an MC4R pathway agonizable gene other than MC4R are functional. In an embodiment the subject is heterozygous at an MC4R pathway agonizable gene other than MC4R and both alleles are functional. In an embodiment the subject is homozygous at an MC4R pathway agonizable gene other than MC4R for a functional allele.

[0032] In an embodiment, both MC4R alleles are nonfunctional. (A nonfunctional allele is an allele which is not functional, as functional is defined herein.) In an embodiment the subject is heterozygous at the MC4R gene and both alleles are nonfunctional. In an embodiment the subject is homozygous at the MC4R gene for a nonfunctional allele.

[0033] In an embodiment, an epigenetic modification, e.g., a histone modification, e.g., acetylation or nucleobase methylation, e.g., cytosine methylation, is present and is associated with the MC4R pathway agonizable gene phenotype, e.g., hyperphagia, appetite, unwanted appetite, obesity, weight, body mass, or a metabolic syndrome (e.g., diabetes) In an embodiment, the epigenetic modification is associated with an MC4R pathway agonizable gene. In an embodiment, the epigenetic modification is associated with MC4R.

[0034] In an embodiment, the epigenetic modification is associated with an MC4R pathway agonizable gene other than MC4R. In an embodiment, the MC4R pathway agonizable gene does not comprise any one of POMC, Proprotein Convertase Subtilisin/Kexin Type 1 (PCSK1, also called PC1/3), MAGE-like-2 (MAGEL2), leptin receptor (leptin-R), leptin, 5-hydroxytryptamine (serotonin) receptor 2C, G protein-coupled (5-HT2c receptor), nescient helix loop helix 2 (NhHL2, also called NSCL2), pro-hormone convertase, carboxypeptidase E (CPE), and single-minded 1 (Sim1). In an embodiment, the MC4R pathway agonizable gene does not comprise any gene disclosed in WO2013/102047 or WO 2017/059076, the full contents of each of which is incorporated herein by reference in its entirety. As used herein, the term “obese” refers to a subject having a body mass index (BMI) within the ranges defined as “obese” by the Center for Disease Control (see, e.g., URL.cdc.gov/obesity/defining.html and www.cdc.gov/obesity/childhood-/defining.html, last accessed on Aug. 26, 2012) or as defined by “Clinical Guidelines on the Identification, Evaluation, and Treatment of Overweight and Obesity in Adults” from the National Institutes of Health. BMI is obtained by dividing a subject's weight, e.g., in kilograms (kg) by the square of the subject's height, e.g., in meter (m). For example, an adult who has a BMI of 30 kg/m² or higher is considered obese. For example, an adult with a BMI of 25.0 to 29.9 kg/m² is considered overweight; an adult with a BMI of 18.5 to 24.9 kg/m² is considered to have a normal or healthy weight range; and an adult with a BMI of less than 18.5 kg/m² is considered to be underweight. For example, an adult having a height of 5 feet, 9 inches with a body weight of 203 pounds or more is considered obese. For pediatric subject, e.g., children and teens, obese refers to a subject having a BMI at or above the 85^{th} to 95^{th} percentile for pediatric subjects, e.g., children and teens, of the same age and sex.

[0035] As used herein, the term “BMI Z-Score” refers to the number of standard deviations in which the absolute BMI value diverges from the mean BMI of a population of interest. For example, a BMI Z-Score of +1.0 indicates that the subject BMI is one (1) standard deviation above the mean BMI (e.g., at approximately the 84th percentile of the population for BMI) of the population of interest. In an embodiment, the BMI Z-score of an obese pediatric patient is at or above a BMI Z-Score of +1.04 to +1.65 or greater, corresponding to a BMI at or above the 85^{th} to 95^{th} percentile for the pediatric subject relative to a population of pediatric subjects of the same age and sex.

[0036] As used herein, the terms “Impact of Weight on Quality of Life (IWQOL)” and “Impact of Weight on Quality of Life-Lite” refers to a psychometric questionnaire for obese and overweight subjects to assess the ramifications of obesity on the subject's ability to live satisfactorily, wherein the scores are individually assessed by the subject or a guardian of the subject. In an embodiment, the IWQOL or IWQOL-Lite score diminishes when the subject develops hypothalamic obesity relative to a reference IWQOL or IWQOL-Lite score, e.g., the IWQOL or _IWQOL-Lite score prior to developing hypothalamic obesity. In an embodiment, the IWQOL or IWQOL-Lite score increases after administration of a therapy which ameliorates the symptoms of hypothalamic obesity, relative to a reference IWQOL or IWQOL-Lite score, e.g., the IWQOL or _IWQOL-Lite score prior to administration of the therapy.

[0037] As used herein, a “weekly average of daily most hunger score” refers to the average or mean of the daily most score hunger score of a subject for a period of week or seven days.

[0038] A “severely obese” subject or a subject having “severe obesity” refers to a subject having a BMI of 35 kg/m² or higher, e.g., 40 kg/m² or higher. For example, a severely obese subject is over 100% over the ideal (normal, healthy) body weight.

[0039] As used herein “early onset”, e.g., as in early onset obesity, refers to an onset (e.g., first occurrence of one or more symptoms of a disorder, e.g., a disorder described herein, e.g., obesity) that occurs in a subject before adulthood, e.g., during childhood, e.g., when the subject is less 18 years of age or younger (e.g., 18, 17, 16, 15, 14, 13, 12, 11, 10, 9, 8, 7, 6, 5, 4, 3, 2, or 1 year of age or younger, or during adolescence, e.g., when the child is younger than 12 years of age or when the child is younger than 6 years of age).

[0040] As used herein, the term “metabolic syndrome” refers to a group of symptoms that occur together and increase the risk for coronary artery disease, stroke, and type 2 diabetes. According to the American Heart Association and the National Heart, Lung, and Blood Institute, metabolic syndrome also referred to as Syndrome X) is present if a subject has three or more of the following signs: 1) Blood pressure equal to or higher than 130/85 mmHg; 2) Fasting blood sugar (glucose) equal to or higher than 100 mg/dL; 3) Large waist circumference (length around the waist): —Men—40 inches or more; —Women—35 inches or more; 4) Low HDL cholesterol: —Men—under 40 mg/dL; —Women—under 50 mg/dL; 5) Triglycerides equal to or higher than 150 mg/dL. Metabolic syndrome can be diagnosed by testing subject's blood pressure, blood glucose level, HDL cholesterol level, LDL cholesterol level, total cholesterol level, and triglyceride level.

[0041] As used herein, the term “agonist” refers to any chemical compound, either naturally occurring or synthetic, that, upon interacting with (e.g., binding to) its target, e.g., MC4R, raises the signaling activity of MC4R above its basal level. An agonist can be a superagonist (i.e. a compound that is capable of producing a greater maximal response than the endogenous agonist for the target receptor, and thus has an efficacy of more than 100%), a full agonist (i.e. a compound that elicits a maximal response following receptor occupation and activation) or a partial agonist (i.e. a compounds that can activate receptors but are unable to elicit the maximal response of the receptor system).

[0042] As used herein “treating” includes achieving one or more of the following results: reducing the body weight (as measured, for example, by a body mass index (BMI) and/or body weight), e.g., compared to a control (e.g., body weight before treatment or a predetermined body weight); reducing the waist circumference, e.g., compared to a control (e.g., waist circumference before treatment or a predetermined waist circumference); reducing the hunger level, e.g., compared to a control (e.g., hunger level before treatment or a predetermined hunger level); increasing the resting energy expenditure (REE), e.g., compared to a control (e.g., REE before treatment or a predetermined REE); decreasing the food intake, e.g., compared to a control level (e.g., before treatment or a predetermined food intake); ameliorating or improving a clinical symptom or indicators associated with a disorder described herein such as obesity, Prader Willi Syndrome, Smith-Magenis syndrome, e.g., type-II diabetes, pre-diabetic condition, blood level of hemoglobin A1C (Hb1Ac) above 6%, hyperinsulimenia, hyperlipidemia, insulin insensitivity, or glucose intolerance; delaying, inhibiting or preventing the progression of obesity and/or obesity related indications; or partially or totally delaying, inhibiting or preventing the onset or development of obesity or a obesity related indication. Delaying, inhibiting or preventing the progression of the obesity includes for example, delaying, inhibiting or preventing the progression of a subject having normal weight to obesity. In embodiments, a control is a value of a parameter measured before treatment by a MC4R agonist described herein or a predetermined value. The term “treating” further includes partially or totally reducing the risk for coronary artery disease, stroke, and type 2 diabetes associated with the metabolic syndrome as well as ameliorating or improving a clinical symptom or signs of metabolic syndrome associated with metabolic syndrome, such as any one or more of the five indicators listed above. For example, the term “treating” includes delaying, inhibiting or preventing the progression of parameters associated with the metabolic syndrome, including insulin resistance, glucose clearance and parameters of cardiovascular disease including heart rate and blood pressure.

[0043] As used herein “inhibition” or “inhibits” can include a reduction in a certain parameter, such as a parameter described herein. For example, inhibition of a parameter, e.g., activity, can be at least 5%, 10%, 20%, 30%, 40%, or more is included by this term. Thus, inhibition need not be 100%.

[0044] “Prophylactic treatment” refers to treatment before onset of obesity to prevent, inhibit or reduce its occurrence.

[0045] As used herein, the term “subject” refers to a mammal, e.g., a human. Subject can also refer to an animal in need of veterinary treatment, e.g., companion animals (e.g., dogs, cats, and the like), farm animals (e.g., cows, sheep, pigs, horses, and the like) and laboratory animals (e.g., rats, mice, guinea pigs, and the like). In an embodiment, the subject is a pediatric subject (e.g., a subject under 21 or 18 years of age). In an embodiment, the subject is an adult subject (e.g., a subject over 18 or 21 years of age).

[0046] As used herein, the term “mutation” can refer to an altered nucleic acid sequence of a gene or fragment thereof compared to a wild-type sequence. For example, a mutation can include a point mutation, frame-shift mutation, missense mutation, inversion, deletion, insertion, truncation, chromosomal translocation. In embodiments, a mutation can result in the gene or fragment thereof coding for a non-functional protein, a protein with reduced activity (or a partially functional protein), or a protein with altered activity. For example, a “loss of function” mutation refers to a mutation that results in the gene or fragment thereof coding for a non-functional protein, which has substantially reduced activity compared to its wild-type counterpart (e.g., a non-functional protein has less than 10%, 9%, 8%, 7%, 6%, 5%, 4%, 3%, 2%, 1% or less activity than its wild-type counterpart). For example, “partial loss of function” mutation refers to a mutation that results in the gene or fragment thereof coding for a partially functional protein, which has reduced activity compared to its wild-type counterpart (e.g., a partially functional protein has less than 50% and greater than 10% of the activity of its wild-type counterpart).

[0047] As used herein “heterozygous” refers to the presence of two different alleles (having different nucleic acid sequences) for a given gene in a subject. In some embodiments, “heterozygous mutation” can refer to the presence of a mutation on one allele for a given gene and the lack of a mutation on the other allele of the same gene in a subject (e.g., one mutant allele and one wild type allele for a given gene). In other embodiments, a “heterozygous mutation” can be a “compound heterozygous” mutation, which refers to the presence of a mutation (e.g., loss of function mutation or partial loss of function mutation) on one allele for a given gene and a different (e.g., loss of function mutation or partial loss of function mutation) on the other allele for the same gene (e.g., two different alleles that are both mutated, e.g., non-functional or partially functional). In embodiments, where a compound heterozygous mutation includes two non-functional alleles, the genotype can be a null genotype or functionally deficient genotype.

[0048] As used herein “homozygous” refers to the presence of two identical alleles for a given gene. In some embodiments, a “homozygous mutation” refers to the presence of two mutant alleles for a given gene, where the two mutant alleles are identical.

[0049] As used herein “null genotype” refers to the presence of two non-functional alleles of a gene in a subject.

[0050] As used herein “unit dosage form” refers to a physically discrete unit suited as unitary doses for a subject to be treated. Each unit contains a predetermined quantity of active compound calculated to produce the desired therapeutic effect in association with the required pharmaceutical carrier.

[0051] As used herein “dosage” refers to a quantity or amount of a therapeutic agent. In some embodiments, a dosage is the amount administered to the subject in a single administration, e.g., in a single injection, a single infusion, or single administration of one or more unit dosages. In embodiments, a dosage is the amount administered to the subject in multiple administrations, e.g., multiple injections, multiple infusions, or multiple administrations of one or more unit dosages. In other embodiments, a dosage can refer to the total amount administered to the subject in a certain time period, e.g., per day. In such examples, the dosage is typically referred to as “daily dosage” or dosage in terms of quantity per day.

[0052] As used herein “hunger” or “hunger level” refers to a subject's appetite, desire to consume food, or perceived need for food. In embodiments, the hunger or hunger level of a subject can be quantified by using a scale to obtain a hunger score. In embodiments, the scale for hunger assigns a higher score for a subject that more frequently (e.g., often or always) feels unbearable hunger and a lower score for a subject that less frequently (e.g., sometimes or never) feels unbearable hunger. See, e.g., Sibilia. Psychological Topics 19 (2010), 2, 341-354. For example, a Likert scale for hunger can be used that assigns scores from 0 to 10 points (0=no hunger; 10=severe hunger). In other examples, a Likert scale for hunger can be used that assigns scores from 1 to 4 points, where a subject who never feels unbearable hunger is assigned a score of 1, where a subject who sometimes feels unbearable hunger is assigned a score of 2, where a subject who often feels unbearable hunger is assigned a score of 3, and where a subject who always feels unbearable hunger is assigned a score of 4. See Id.

### Selected Chemical Definitions

[0053] Definitions of specific functional groups and chemical terms are described in more detail below. The chemical elements are identified in accordance with the Periodic Table of the Elements, CAS version, Handbook of Chemistry and Physics, 75^{th} Ed., inside cover, and specific functional groups are generally defined as described therein. Additionally, general principles of organic chemistry, as well as specific functional moieties and reactivity, are described in Thomas Sorrell, Organic Chemistry, University Science Books, Sausalito, 1999; Smith and March, March's Advanced Organic Chemistry, 5^{th} Edition, John Wiley & Sons, Inc., New York, 2001; Larock, Comprehensive Organic Transformations, VCH Publishers, Inc., New York, 1989; and Carruthers, Some Modern Methods of Organic Synthesis, 3^{rd} Edition, Cambridge University Press, Cambridge, 1987.

[0054] Unless defined otherwise, all technical and scientific terms used herein have the same meaning as commonly understood by one of ordinary skill in the art. The chemical structures and formulae set forth herein are constructed according to the standard rules of chemical valency known in the chemical arts. Also, all publications, patent applications, patents and other references mentioned herein are incorporated by reference in their entirety.

[0055] The nomenclature used to define the peptides is that typically used in the art wherein the amino group at the N-terminus appears to the left and the carboxyl group at the C-terminus appears to the right. Where the amino acid has D and L isomeric forms, it is the L form of the amino acid that is represented unless otherwise explicitly indicated.

[0056] When a range of values is listed, it is intended to encompass each value and sub-range within the range. For example, “C₁-C₆ alkyl” is intended to encompass, C₁, C₂, C₃, C₄, C₅, C₆, C₁-C₆, C₁-C₅, C₁-C₄, C₁-C₃, C₁-C₂, C₂-C₆, C₂-C₅, C₂-C₄, C₂-C₃, C₃-C₆, C₃-C₅, C₃-C₄, C₄-C₆, C₄-C₅, and C₅-C₆ alkyl.

[0057] The compounds useful for practicing the methods described herein may possess one or more chiral centers and so exist in a number of stereoisomeric forms. All stereoisomers and mixtures thereof are included in the scope of the present disclosure. Racemic compounds may either be separated using preparative HPLC and a column with a chiral stationary phase or resolved to yield individual enantiomers utilizing methods known to those skilled in the art. In addition, chiral intermediate compounds may be resolved and used to prepare chiral compounds of the disclosure.

[0058] The compounds useful for practicing the methods described herein may also comprise one or more isotopic substitutions. For example, H may be in any isotopic form, including ¹H, ²H (D or deuterium), and ³H (T or tritium); C may be in any isotopic form, including ¹²C, ¹³C, and ¹⁴C; O may be in any isotopic form, including ¹⁶O and ¹⁸O; and the like.

[0059] The term “pharmaceutically acceptable salt” as used herein is meant to include salts of the active compounds that are prepared with relatively nontoxic acids or bases, depending on the particular substituents found on the compounds described herein. When compounds used in the present disclosure contain relatively acidic functionalities, base addition salts can be obtained by contacting the neutral form of such compounds with a sufficient amount of the desired base, either neat or in a suitable inert solvent. Examples of pharmaceutically acceptable base addition salts include sodium, potassium, calcium, ammonium, organic amino, or magnesium salt, or a similar salt. When compounds used in the present disclosure contain relatively basic functionalities, acid addition salts can be obtained by contacting the neutral form of such compounds with a sufficient amount of the desired acid, either neat or in a suitable inert solvent. Examples of pharmaceutically acceptable acid addition salts include those derived from inorganic acids like hydrochloric, hydrobromic, nitric, carbonic, monohydrogencarbonic, phosphoric, monohydrogenphosphoric, dihydrogenphosphoric, sulfuric, monohydrogensulfuric, hydriodic, or phosphorous acids and the like, as well as the salts derived from organic acids like acetic, propionic, isobutyric, maleic, malonic, benzoic, succinic, suberic, fumaric, lactic, mandelic, phthalic, benzenesulfonic, p-tolylsulfonic, citric, tartaric, methanesulfonic, and the like. Also included are salts of amino acids such as arginate and the like, and salts of organic acids like glucuronic or galacturonic acids and the like (see, e.g., Berge et al, Journal of Pharmaceutical Science 66: 1-19 (1977)). Certain specific compounds used in the present disclosure contain both basic and acidic functionalities that allow the compounds to be converted into either base or acid addition salts. These salts may be prepared by methods known to those skilled in the art. Other pharmaceutically acceptable carriers known to those of skill in the art are suitable for use in the present disclosure.

[0060] The compounds useful for practicing the methods described herein can also exist in unsolvated forms as well as solvated forms, including hydrated forms. In general, the solvated forms are equivalent to unsolvated forms and are encompassed within the scope of the present disclosure. The compounds useful for practicing the methods described herein may exist in multiple crystalline or amorphous forms. In general, all physical forms are equivalent for the uses contemplated by the present disclosure and are intended to be within the scope of the present disclosure.

[0061] The term “solvate” refers to forms of the compound that are associated with a solvent, usually by a solvolysis reaction. This physical association may include hydrogen bonding. Conventional solvents include water, methanol, ethanol, acetic acid, DMSO, THF, diethyl ether, and the like. The compounds described herein may be prepared, e.g., in crystalline form, and may be solvated. Suitable solvates include pharmaceutically acceptable solvates and further include both stoichiometric solvates and non-stoichiometric solvates.

[0062] The term “hydrate” refers to a compound which is associated with water. Typically, the number of the water molecules contained in a hydrate of a compound is in a definite ratio to the number of the compound molecules in the hydrate. Therefore, a hydrate of a compound may be represented, for example, by the general formula R·x H₂O, wherein R is the compound and wherein x is a number greater than 0.

[0063] The term “tautomer” as used herein refers to compounds that are interchangeable forms of a compound structure, and that vary in the displacement of hydrogen atoms and electrons. Thus, two structures may be in equilibrium through the movement of π electrons and an atom (usually H). For example, enols and ketones are tautomers because they are rapidly interconverted by treatment with either acid or base. Tautomeric forms may be relevant to the attainment of the optimal chemical reactivity and biological activity of a compound of interest Table 1 provides definition for chemical abbreviations used herein

TABLE 1
Definitions of chemical abbreviations.

| Symbol | Meaning |
|---|---|
| Abu | α-aminobutyric acid |
| Ac | acyl group |
| Acc | 1-amino-1-cyclo(C₃ C₉)alkyl carboxylic acid |
| A3c | 1-amino-1cyclopropanecarboxylic acid |
| A4c | 1-amino-1-cyclobutanecarboxylic acid |
| A5c | 1-amino-1-cyclopentanecarboxylic acid |
| A6c | 1-amino-1-cyclohexanecarboxylic acid |
| Aha | 7-aminoheptanoic acid |
| Ahx | 6-aminohexanoic acid |
| Aib | α-aminoisobutyric acid |
| Aic | 2-aminoindan-2-carboxylic acid |
| Ala or A | Alanine |
| β-Ala | β-alanine |
| Apc | denotes the structure: |
| | [chemical structure] |
| Apn | 5-aminopentanoic acid (HN—(CH2)₄—C(O) |
| Arg or R | Arginine |
| hArg | Homoarginine |
| Asn or N | Asparagine |
| Asp or D | aspartic acid |
| Bal | 3-benzothienylalanine |
| Bip | 4,4'-biphenylalanine, represented by the structure |
| | [chemical structure] |
| Bpa | 4-benzoylphenylalanine |
| 4-Br-Phe | 4-bromo-phenylalanine |
| Cha | β-cyclohexylalanine |
| hCha | homo-cyclohexylalanine |
| Chg | Cyclohexylglycine |
| Cys or C | Cysteine |
| hCys | Homocysteine |
| Dab | 2,4-diaminobutyric acid |
| Dap | 2,3-diaminopropionic acid |
| Dip | B,B-diphenylalanine |
| Doc | 8-amino-3,6-dioxaoctanoic acid with the structure of: |
| | [chemical structure] |
| 2-Fua | β-(2-furyl)-alanine |
| Gaba | 4-aminobutyric acid |
| Gln or Q | Glutamine |
| Glu or E | glutamic acid |
| Gly or G | Glycine |
| His or H | Histidine |
| 3-Hyp | trans-3-hydroxy-L-proline, i.e., (2S,3S)-3-hydroxy- |
| | pyrrolidine-2-carboxylic acid |
| 4-Hyp | 4-hydroxyproline, i.e., (2S,4R)-4-hydorxypyrrolidine- |
| | 2-carboxylic acid |
| Ile or 1 | Isoleucine |
| Leu or L | Leucine |
| hLeu | Homoleucine |
| Lys or K | Lysine |
| Met or M | Methionine |
| β-hMet | β-homomethionine |
| 1-Nal | β-(1-naphthyl)alanine |
| 2-Nal | β-(2-naphthyl)alanine |
| Nip | nipecotic acid |
| Nle | Norleucine |
| Ole | octahydroindole-2-carboxylic acid |
| Orn | Ornithine |
| 2-Pal | β-(2-pyridiyl)alanine |
| 3-Pal | β-(3-pyridiyl)alanine |
| 4-Pal | β-(4-pyridiyl)alanine |
| Pen | Penicillamine |
| Pff | (S)-pentafluorophenylalanine |
| Phe or F | Phenylalanine |
| hPhe | homophenylalanine |
| Pro or P | Proline |
| hProP | Homoproline |
| Ser or S | Serine |
| Tle | tert-Leucine |
| Taz | β-(4-thiazolyl)alanine |
| 2-Thi | β-(2-thienyl)alanine |
| 3-Thi | β-(3-thienyl)alanine |
| Thr or T | Threonine |
| Trp or W | Tryptophan |
| Tyr or Y | Tyrosine |
| D-(Et) Tyr | has a structure of |
| | [chemical structure] |
| Val or V | Valine |
| | Certain other abbreviations used herein are defined as follows: |
| Boc: | tert-butyloxycarbonyl |
| Bzl: | Benzyl |
| DCM: | Dichloromethane |
| DIC: | N,N-diisopropylcarbodiimide |
| DIEA: | diisopropylethyl amine |
| Dmab: | 4-{N-(1-(4,4-dimethyl-2,6-dioxocyclohexylidene)- |
| | 3-methylbutyl)-amino}benzyl |
| DMAP: | 4-(dimethylamino)pyridine |
| DMF: | Dimethylformamide |
| DNP: | 2,4-dinitrophenyl |
| Fm: | Fluorenylmethyl |
| Fmoc: | fluorenylmethyloxycarbonyl |
| For: | Formyl |
| HBTU: | 2-(1H-benzotriazole-1-yl)-1,1,3,3-tetramethyluronium |
| | hexafluorophosphate |
| cHex | Cyclohexyl |
| HOAT: | O-(7-azabenzotriazol-1-yl)-1,1,3,3-tetramethyluronium |
| | hexafluorophosphate |
| HOBt: | 1-hydroxy-benzotriazole |
| MBNA | 4-methylbenzhydrylamine |
| Mmt: | 4-methoxytrityl |
| NMP: | N-methylpyrrolidone |
| O-tBu | oxy-tert-butyl |
| Pbf: | 2,2,4,6,7-pentamethyldihydrobenzofuran-5-sulfonyl |
| PyBroP | bromo-tris-pyrrolidino-phosphonium hexafluorophosphate |
| tBu: | tert-butyl |
| TIS: | triisopropylsilane |
| TOS: | Tosyl |
| Trt | Trityl |
| TFA: | trifluoro acetic acid |
| TFFH: | tetramethylfluoroforamidiaium hexafluorophosphate |
| Z: | benzyloxycarbonyl |

[0064] Unless otherwise indicated, with the exception of the N-terminal amino acid, all abbreviations (e.g. Ala) of amino acids in this disclosure stand for the structure of —NH—C(R)(R′)—CO—, wherein R and R′ each is, independently, hydrogen or the side chain of an amino acid (e.g., R=CH₃ and R′═H for Ala), or R and R′ may be joined to form a ring system.

[0065] For the N-terminal amino acid, the abbreviation stands for the structure of:

[chemical structure]

[0066] The designation “NH₂” in e.g., as in Ac-Nle-c(Cys-D-Ala-His-D-Phe-Arg-Trp-Cys)-NH₂ (SEQ ID NO:13), indicates that the C-terminus of the peptide is amidated. Ac-Nle-c(Cys-D-Ala-His-D-Phe-Arg-Trp-Cys) (SEQ ID NO:107), or alternatively Ac-Nle-c(Cys-D-Ala-His-D-Phe-Arg-Trp-Cys)-OH (SEQ ID NO:107), indicates that the C-terminus is the free acid.

[0067] “-c(Cys-Cys)-” or “-cyclo(Cys-Cys)-” denotes the structure:

[chemical structure]

[0068] “-c(Cys-Pen)-” or “-cyclo(Cys-Pen)-” denotes the structure:

[chemical structure]

[0069] “-c(Asp-Lys)-” or “-cyclo(Asp-Lys)-” denotes the structure:

[chemical structure]

[0070] The following abbreviations are used throughout the disclosure:

[0071] “Hydantoin-(C(O)-(A^{a}-A^{b}))” denotes the structure:

[chemical structure]

wherein amino acid “A^{a}” has the structure:

[chemical structure]

and amino acid “A^{b}” the structure:

[chemical structure]

[0072] For example, “Hydantoin-(C(O)-Arg-A^{b}))” would have the following structure:

[chemical structure]

[0073] For example, “Hydantoin-(C(O)-(Arg-Gly))” would have the following structure:

[chemical structure]

[0074] For example, a compound represented as “c[Hydantoin(C(O)-(Cys-A^{b}))-A¹-A²-A³-A⁴-Cys]-” would have the following the structure:

[chemical structure]

[0075] whereas a compound represented as “c[Hydantoin(C(O)-(A^{b}-Cys))-A¹-A²-A³-A⁴-Cys]-” would have the structure:

[chemical structure]

[0076] For further guidance, “c[Hydantoin(C(O)-(Asp-A^{b}))-A¹-A²-A³-A⁴-Lys]-” represents the following compound:

[chemical structure]

[0077] whereas “c[Hydantoin(C(O)-(Dap-A^{b}))-A¹-A²-A³-A⁴-Asp]-” has the following formula:

[chemical structure]

[0078] “Acyl” refers to R″—C(O)—, where R″ is H, alkyl, substituted alkyl, heteroalkyl, substituted heteroalkyl, alkenyl, substituted alkenyl, aryl, alkylaryl, or substituted alklyaryl, and is indicated in the general formula of a particular embodiment as “Ac”.

[0079] “Alkyl” refers to a hydrocarbon group containing one or more carbon atoms, where multiple carbon atoms if present are joined by single bonds. The alkyl hydrocarbon group may be straight-chain or contain one or more branches or cyclic groups.

[0080] “Hydroxyalkyl” refers to an alkyl group wherein one or more hydrogen atoms of the hydrocarbon group are substituted with one or more hydroxy radicals, such as hydroxymethyl, hydroxyethyl, hydroxypropyl, hydroxybutyl, hydroxypentyl, hydroxyhexyl and the like.

[0081] “Substituted alkyl” refers to an alkyl wherein one or more hydrogen atoms of the hydrocarbon group are replaced with one or more substituents selected from the group consisting of halogen, (i.e., fluorine, chlorine, bromine, and iodine), —OH, —CN, —SH, amine (e.g., —NH₂, —NHCH₃), —NO₂, guanidine, urea, amidine, and —(C₁-C₂₀) alkyl, wherein said —(C₁-C₂₀) alkyl optionally may be substituted with one or more substituents selected, independently for each occurrence, from the group consisting of halogens, —CF₃, OCH₃, OCF₃, and —(CH₂)₀₋₂₀—COOH. In different embodiments 1, 2, 3 or 4 substituents are present. The presence of —(CH₂)₀₋₂₀—COOH results in the production of an alkyl acid. Non-limiting examples of alkyl acids containing, or consisting of, —(CH₂)₀₋₂₀—COOH include 2-norbornane acetic acid, tert-butyric acid, 3-cyclopentyl propionic acid, and the like.

[0082] The term “halo” encompasses fluoro, chloro, bromo and iodo.

[0083] Guanidines are a group of organic compounds that share a common functional group with the general structure (R¹R²N)(R³R⁴N)C═N—R⁵. The central bond within this group is an imine, and the group is related structurally to amidines and ureas.

[0084] “Heteroalkyl” refers to an alkyl wherein one of more of the carbon atoms in the hydrocarbon group is replaced with one or more of the following groups: amino, amido, —O—, —S— or carbonyl. In different embodiments 1 or 2 heteroatoms are present.

[0085] “Substituted heteroalkyl” refers to a heteroalkyl wherein one or more hydrogen atoms of the hydrocarbon group are replaced with one or more substituents selected from the group consisting of halogen, (i.e., fluorine, chlorine, bromine, and iodine), —OH, —CN, —SH, —NH₂, —NHCH₃, NO₂, and —(C₁-C₂₀) alkyl, wherein said —(C₁-C₂₀) alkyl optionally may be substituted with one or more substituents selected, independently for each occurrence, from the group consisting of halogens, —CF₃, —OCH₃, —OCF₃, and —(CH₂)₀₋₂₀—COOH. In different embodiments 1, 2, 3 or 4 substituents are present.

[0086] “Alkenyl” refers to a hydrocarbon group made up of two or more carbons where one or more carbon-carbon double bonds are present. The alkenyl hydrocarbon group may be straight-chain or contain one or more branches or cyclic groups.

[0087] “Substituted alkenyl” refers to an alkenyl wherein one or more hydrogens are replaced with one or more substituents selected from the group consisting of halogen (i.e., fluorine, chlorine, bromine, and iodine), —OH, —CN, —SH, —NH₂, —NHCH₃, —NO₂, and —(C₁-C₂₀) alkyl, wherein said —(C₁-C₂₀) alkyl optionally may be substituted with one or more substituents selected, independently for each occurrence, from the group consisting of halogens, —CF₃, OCH₃, OCF₃, and (CH₂)₀₋₂₀COOH. In different embodiments 1, 2, 3 or 4 substituents are present.

[0088] “Aryl” refers to an optionally substituted aromatic group with at least one ring having a conjugated pi-electron system, containing up to three conjugated or fused ring systems. Aryl includes carbocyclic aryl, heterocyclic aryl and biaryl groups. Preferably, the aryl is a 5- or 6-membered ring. Preferred atoms for a heterocyclic aryl are one or more sulfur, oxygen, and/or nitrogen. Non-limiting examples of aryl include phenyl, 1-naphthyl, 2-naphthyl, indole, quinoline, 2-imidazole, 9-anthracene, and the like. Aryl substituents are selected from the group consisting of —(C₁-C₂₀) alkyl, —(C₁-C₂₀) alkoxy, halogen (i.e., fluorine, chlorine, bromine, and iodine), —OH, —CN, —SH, —NH₂, —NO₂, —(C₁-C₂₀) alkyl substituted with halogens, —CF₃, —OCF₃, and —(CH₂)₀₋₂₀COOH. In different embodiments the aryl contains 0, 1, 2, 3, or 4 substituents.

[0089] “Alkylaryl” refers to an “alkyl” joined to an “aryl”.

[0090] The term “(C₁₋₁₂)hydrocarbon moiety” encompasses alkyl, alkenyl and alkynyl and in the case of alkenyl and alkynyl there is C₂-C₁₂.

[0091] For the avoidance of doubt, unless otherwise indicated, the term substituted means substituted by one or more defined groups. In the case where groups may be selected from a number of alternative groups, the selected groups may be the same or different. For the avoidance of doubt, the term independently means that where more than one substituent is selected from a number of possible substituents, those substituents may be the same or different.

[0092] Designation “(amino acid)₁” means that an amino acid is repeated n times. For example, designation “(Pro)₂” or “(Arg)₃” mean that proline or arginine residues are repeated, respectively, two or three times.

### MC4R

[0093] hMC4R is a protein encoded by a genomic sequence having GenBank accession number CH471077.2. Mutations in the MC4R receptor are an associated cause of severe childhood obesity. The carrier prevalence for MC4R mutations in a juvenile-onset obese population has been noted to be around 2.5% with a highest prevalence of 6% among severely obese children. Humans with MC4R mutations show a more or less similar phenotype as has been described for mice with mutations in the MC4R gene. MC4R deficient patients show hyperphagia, hyperinsulinaemia, increased fat mass, accompanied by lean body mass, bone mineral density and linear growth rate increases, with no changes in cortisol levels, gonadotropin, thyroid and sex steroid levels. In contrast to MC4R deletion, hyperphagia and hyperinsulinaemia tends to subside with age in human subjects. Similar to the MC4R knockout mice, the phenotype in heterozygote carriers is intermediate in comparison to homozygote carriers. The exhibited hyperphagia observed upon a test meal is less severe than that observed in people with a leptin deficiency. The severity of MC4R dysfunction seen in assays in vitro can predict the amount of food ingested at a test meal by the subject harboring that particular mutation and correlates with the onset and severity of the obese phenotype. At least 90 different MC4R mutations have been associated with obesity and additional mutations in the MC4R are likely to be discovered, leading to a similar obesity phenotype.

[0094] Examples of the MC4R mutations that cause obesity in humans are described, e.g., in Farooqi et al., The Journal of Clinical Investigation, July 2000, vol. 106 (2), pp. 271-279 and Vaisse et al., The Journal of Clinical Investigation, July 2000, vol. 106(2), pp. 253-262, the relevant portions of which are incorporated herein by reference).

[0095] Additional mutations that potentially cause obesity in humans include, R18H, R18L, S36Y, P48S, V50M, F51L, E61K, I69T, D90N, S94R, G98R, I121T, A154D, Y157S, W174C, G181D, F202L, A219 V, 1226T, G231S, G238D, N240S, C₂₇₁R, S295P, P299L, E308K, I317V, L325F, and 750DelGA, as described in Xiang et al., “Pharmacological characterization of 30 human melanocortin-4 receptor polymorphisms with the endogenous proopiomelanocortin-derived agonists, synthetic agonists, and the endogenous agouti-related protein antagonist.” Biochemistry, 2010 Jun. 8; 49(22):4583-600, the relevant portions of which are incorporated herein by reference.

[0096] Further examples of mutations that potentially cause obesity in humans are those listed in Online Mendelian Inheritance in Man (OMIM), a database of human genes and genetic disorders, under the accession number 155541 (MC4R) (more precisely, accession nos. 155541.0001-155541.0023) at the URL http://omim.org/entry/155541. Representative examples include 4-BP DEL, NT631; 4-BP INS, NT732; TYR35TER; ASP37VAL; SER58CYS; ILE102SER; ASN274SER; 1-BP INS, 112A; 4-BP DEL, 211CTCT; ILE125LYS; ALA175THR; ILE316SER; TYR287TER; ASN97ASP; 15-BP DEL (delta88-92 codons); and SER127LEU. The relevant portions of the OMIM database are incorporated herein by reference. Additional exemplary mutations in MC4R are described in Lee. Annals Acad. Med. 38.1(2009):34-44.

[0097] In example embodiments, the MC4R mutation results in retention of the MC4R signaling activity. Mutations in the genomic sequence encoding MC4R can be detected by the methods that are known to a person of ordinary skill in the art. For example, the genomic sequence can be cloned using nucleotide primers, such as e.g., the primers described in Farooqi et al., The Journal of Clinical Investigation, July 2000, vol. 106 (2), pp. 271-279 and Vaisse et al., The Journal of Clinical Investigation, July 2000, vol. 106(2), pp. 253-262, and the cloned sequence analyzed using commercially available sequencers and software.

[0098] Activity of MC4R can be measured by the methods known to a person of ordinary skill in the art. For example, cells can be transiently transfected with the cloned MC4R DNA, the transfected cells contacted by an agonist of MC4R (e.g. α-MSH), and the intracellular level of cAMP, the secondary messenger of MC4R, measured by an electrochemiluminescence assay described, e.g., in Roubert et al., Journal of Endocrinology (2010) 207, pp. 177-183. A reduction in MC4R signaling can be ascertained by comparing the intracellular level of cAMP produced in response to a given agonist by a wild type MC4R to that produced by a mutant MC4R.

[0099] The MC4R agonist may bind to the MC4R directly or indirectly. In an embodiment, the MC4R agonist binds to the MC4R in or near the ligand-binding pocket. In an embodiment, the MC4R agonist binds to the MC4R in or near the G-protein binding cavity. In an embodiment, the MC4R agonist binds to the MC4R binds in or near a transmembrane domain or extracellular loop, for example, TM2, TM3, TM5, TM7, EL2, and/or EL3. Additional interactions of the MC4R agonist and the MC4R may be exemplified in Nat Cell Research (2021) 31:1176-1189, which is incorporated herein by reference in its entirety.

### Melanocortin-4 Receptor (MC4R) Pathway Genes

[0100] The melanocortin system, which includes melanocortins (MCs), agouti, agouti-related proteins, and their receptors, integrate hormonal, metabolic, and neural signals in order to control energy homeostasis and regulate appetite, energy expenditure, and body weight. The MCs, which include alpha-melanocyte-stimulating hormone (α-MSH), β-MSH, γ-MSH, and ACTH, are a family of peptide hormones that are derived from a precursor protein called proopiomelanocortin (POMC). Activation of MC4 receptor (MC4R) in the POMC-MC4R pathway increases energy expenditure and decreases food intake. See, e.g., Fan et al. Nature 1997; 385:165-68. The POMC-MC4R pathway includes a number of proteins, such as melanocortins (MCs), MC4 receptor (MC4R), POMC, Proprotein Convertase Subtilisin/Kexin Type 1 (PCSK1, also called PC1/3), MAGE-like-2 (MAGEL2), leptin receptor (leptin-R), leptin, 5-hydroxytryptamine (serotonin) receptor 2C, G protein-coupled (5-HT2c receptor), nescient helix loop helix 2 (NhHL2, also called NSCL2), pro-hormone convertase, carboxypeptidase E (CPE), and single-minded 1 (Sim1), that together contribute to the regulation of energy homeostasis, e.g., by regulating appetite and energy expenditure. MC4R and other components of the POMC-MC4R pathway have a significant role in weight regulation. A mutation of the MC4R gene was reported to result in early-onset and severe obesity. It is believed that other genetic defects in the POMC-MC4R pathway likely also lead to early-onset and severe obesity. These genes are collectively termed “MC4R pathway agonizable genes” and examples are provided below. In an embodiment, the MC4R pathway agonizable gene does not comprise any one of POMC, Proprotein Convertase Subtilisin/Kexin Type 1 (PCSK1, also called PC1/3), MAGE-like-2 (MAGEL2), leptin receptor (leptin-R), leptin, 5-hydroxytryptamine (serotonin) receptor 2C, G protein-coupled (5-HT2c receptor), nescient helix loop helix 2 (NhHL2, also called NSCL2), pro-hormone convertase, carboxypeptidase E (CPE), and single-minded 1 (Sim1). In an embodiment, the subject does not exhibit a genetic mutation or genetic defect in an MC4R agonizable gene, e.g., an MC4R agonizable gene described below.

### ADP Ribosylation Factor-Like GTPase 6 (ARL6)

[0101] ADP Ribosylation Factor-like GTPase 6 (ARL6), also known as BBS3, is a member of the ARF-like (ADP ribosylation factor-like) sub-family of the ARF family of GTP-binding proteins, which are involved in the regulation of intracellular traffic. ARL6 is involved in membrane protein trafficking at the base of the ciliary organelle and mediates recruitment onto plasma membrane of the BBSome complex. Together with BBS1, ARL6 is necessary for correct trafficking of PKD1 to primary cilia. Together with the BBSome complex and LTZL1, ARL6 controls SMO ciliary trafficking and contributes to the sonic hedgehog (SHH) pathway regulation. It is believed that ARL6 may regulate cilia assembly and disassembly and subsequent ciliary signaling events such as the Wnt signaling cascade. ARL6 isoform 2 may be required for proper retinal function and organization. A vision-specific transcript, encoding long isoform BBS3L, has also been described.

[0102] Mutations in the ARL6 gene are associated with Bardet-Biedl syndrome (BBS), a genetically heterogeneous disorder. BBS is a form of Laurence-Moon-Beidl syndrome and is characterized by obesity, retinopathy, learning disability, polydactyly, hypogenitalism, and retinitis pigmentosa 55. (See, e.g., Young et al. Am. J. Med. Genet. 78(5):461-7 (2002)).

[0103] The human ARL6 gene sequence is provided in GenBank Accession No. NG_008119.2, incorporated herein by reference. An exemplary human ARL6 nucleic acid sequence is provided in GenBank Accession No. NM_001278293.3, incorporated herein by reference. An exemplary amino acid sequence of human ARL6 is provided by Q9HOF7, incorporated herein by reference. In an embodiment, the subject does not have or is not identified as having a genetic mutation or genetic defect in the ARL6 gene.

Retinoic Acid Induced 1 (RAI1) Retinoic Acid Induced 1 (RAI1) is a transcription factor that regulates the circadian clock components: CLOCK, ARNTL/BMALL1, ARNTL2/BMAL2, PER1/3, CRY1/2, NR1DL/2, and RORA/C, RAI1 positively regulates the transcriptional activity of CLOCK, a core component of the circadian clock. (See, e.g., Williams et al. Am. J. Hum. Genet. 90(6):941-9 (2012)). RAI1 also regulates transcription through chromatin remodeling by interacting with other proteins in chromatin as well as proteins in the basic transcriptional machinery. It is believed that RAI1 may be important for embryonic and postnatal development and may be involved in neuronal differentiation.

[0104] Mutations in RAI1 (e.g., leading to haploinsufficiency) are associated with Smith-Magenis Syndrome, a disorder characterized by cognitive and behavioral abnormalities, including self-injurious behaviors and sleep disturbance, obesity, and distinct craniofacial and skeletal anomalies, that has been associated with deletions involving chromosome 17p11.2. (See, e.g., Slager et al. Nat Genet. 33(4):466-468 (2003)).

[0105] The human RAI1 gene sequence is provided in GenBank Accession No. NG_007101.2, incorporated herein by reference. An exemplary human RAI1 nucleic acid sequence is provided in GenBank Accession No. NM_030665.4, incorporated herein by reference. An exemplary amino acid sequence of human RAI1 is provided by Q7Z5J4-1, incorporated herein by reference. In an embodiment, the subject does not have or is not identified as having a genetic mutation or genetic defect in the RAI1 gene.

### Steroid Receptor Coactivator 1 (SRC1)

[0106] Steroid Receptor Coactivator 1 (SRC1), also known as Nuclear Receptor Coactivator 1 (NCOA1), is a transcriptional coactivator for steroid and nuclear hormone receptors. SRC1 is a member of the p160/SRC family, and like other family members, has histone acetyltransferase activity and contains a nuclear localization signal, as well as bHLH and PAS domains. SRC1 binds nuclear receptors directly and stimulates the transcriptional activities in a hormone-dependent fashion. SRC1 is involved in the coactivation of different nuclear receptors, such as for steroids, retinoids, thyroid hormone, and prostanoids. SRC1 is also involved in coactivation mediated by STAT3, STAT5A, STAT5B, and STAT6 transcription factors. SRC1 plays a central role in creating multi-subunit coactivator complexes that act via remodeling of chromatin, and possibly acts by participating in both chromatin remodeling and recruitment of general transcription factors. It is required with NCOA2 to control energy balance between white and brown adipose tissues and for mediating steroid hormone response. Alternatively spliced transcript variants encoding different isoforms have also been identified.

[0107] Mutations in SRC1 has been linked to obesity. Without wishing to be bound by theory, it is believed that SRC-1 modulates the function of hypothalamic Proopiomelanocortin (Pomc) neurons, which regulate food intake and body weight. Rare heterozygous variants of SRC1 were found in severely obese individuals that impaired leptin mediated Pomc reporter activity in cells. (See, e.g., Yang et al. Nat. Commun. 10(1):1718 (2019)).

[0108] The human SRC1 gene sequence is provided in GenBank Accession No. NG_029014.2, incorporated herein by reference. An exemplary human SRC1 nucleic acid sequence is provided in GenBank Accession No. NM_003743.5, incorporated herein by reference. An exemplary amino acid sequence of human SRC1 is provided by Q15788-1, incorporated herein by reference. In an embodiment, the subject does not have or is not identified as having a genetic mutation or genetic defect in the SRC1 gene.

### Bardet-Biedl Syndrome 19 (BBS19)

[0109] Bardet-Biedl Syndrome 19 (BBS19), also known as intraflagellar transport protein 27 homolog (IFT27), is a small GTPase-like component of the intraflagellar transport complex B, which is essential for cilia biogenesis and maintenance. BBS19 promotes the exit of the BBSome complex from cilia via its interaction with ARL6. BBS19 forms a subcomplex within the IFT complex B with IFT25 and prevents aggregation of GTP-free ARL6 but is not believed to be involved in entry of the BBSome complex into cilium. (See, e.g., Liew et al. Dev. Cell 31(3):265-278 (2014)). BBS19 is also required for hedgehog signaling. Its role in intraflagellar transport is mainly seen in tissues rich in ciliated cells such as kidney and testis. BBS19 is essential for male fertility, spermiogenesis and sperm flagella formation, plays a role in the early development of the kidney, and may be involved in the regulation of ureteric bud initiation.

[0110] Mutations in the BBS19 gene have been associated with Bardet-Biedl syndrome (See, e.g., Aldahmesh et al. Hum. Mol. Genet. 23(12):3307-15 (2014)).

[0111] The human BBS19 gene sequence is provided in GenBank Accession No. NG_034205.1, incorporated herein by reference. An exemplary human BBS19 nucleic acid sequence is provided in GenBank Accession No. NM_001177701.3, incorporated herein by reference. An exemplary amino acid sequence of human BBS19 is provided by Q9BW83-1, incorporated herein by reference. In an embodiment, the subject does not have or is not identified as having a genetic mutation or genetic defect in the BBS19 gene.

### Bardef-Biedl Syndrome 21 (BBS21)

[0112] The Bardet-Biedl syndrome 21 (BBS21) gene, also known as chromosome 8 open reading frame 37 (C8orf37), encodes a broadly expressed protein of unknown function. High levels of BBS21 mRNA can be found in the brain, heart, and retina. The protein has been shown to co-localize with polyglutamylated tubulin at the base of the primary cilium in human retinal pigment epithelial cells. Mutations in the BBS21 gene have been associated with Bardet-Biedl syndrome, autosomal recessive cone-rod dystrophy (arCRD), and retinitis pigmentosa (See, e.g., Heon et al. Hum. Mol. Genet. 25(11):2283-2294 (2016)).

[0113] The human BBS21 gene sequence is provided in GenBank Accession No. NG_032804.1, incorporated herein by reference. An exemplary human BBS21 nucleic acid sequence is provided in GenBank Accession No. NM_177965.4, incorporated herein by reference. An exemplary amino acid sequence of human BBS21 is provided by Q96NL8-1, incorporated herein by reference. In an embodiment, the subject does not have or is not identified as having a genetic mutation or genetic defect in the BBS21 gene.

### Centrosomal Protein 290 (CEP290)

[0114] Centrosomal Protein 290 (CEP290), also known as BBS14, encodes a protein with thirteen putative coiled-coil domains, a region with homology to SMC chromosome segregation ATPases, six KID motifs, three tropomyosin homology domains, and an ATP/GTP binding site motif A. The protein is localized to the centrosome and cilia and has sites for N-glycosylation, tyrosine sulfation, phosphorylation, N-myristoylation, and amidation.

[0115] CEP290 is involved in early and late steps in cilia formation and its association with CCP110 is required for inhibition of primary cilia formation by CCP110. CEP290 may play a role in early ciliogenesis in the disappearance of centriolar satellites and in the transition of primary ciliar vesicles (PCVs) to capped ciliary vesicles (CCVs). CEP290 is also required for the centrosomal recruitment of RAB8A and for the targeting of centriole satellite proteins to centrosomes such as of PCM1. It is required for the correct localization of ciliary and phototransduction proteins in retinal photoreceptor cells and may play a role in ciliary transport processes. Required for efficient recruitment of RAB8A to primary cilium. In the ciliary transition zone, CEP290 is part of the tectonic-like complex, which is required for tissue-specific ciliogenesis and may regulate ciliary membrane composition. CEP290 is involved in regulation of the BBSome complex integrity, specifically for presence of BBS2, BBS5, and BBS8/TTC8 in the complex, and in ciliary targeting of selected BBSome cargos. CEP290 may play a role in controlling entry of the BBSome complex to cilia.

[0116] Mutations in this gene have been associated with several ciliopathies including Bardet-Biedl syndrome, isolated retinal degeneration, nephronophthisis (NPHP), Joubert syndrome, Senior-Loken syndrome (SLSN), and neonatal lethal Meckel-Gruber syndrome (MKS). (See, e.g., Zhang et al. Hu. Mol. Genet. 23(1):40-51 (2014) and Leitch et al. Nat. Genet. 40(4):443-448 (2008)).

[0117] The human CEP290 gene sequence is provided in GenBank Accession No. NG_008417.2, incorporated herein by reference. An exemplary human CEP290 nucleic acid sequence is provided in GenBank Accession No. NM_025114.4, incorporated herein by reference. An exemplary amino acid sequence of human CEP290 is provided by 015078-1, incorporated herein by reference. In an embodiment, the subject does not have or is not identified as having a genetic mutation or genetic defect in the CEP290 gene.

### Intraflagellar Transport 74 (IFT74)

[0118] Intraflagellar Transport 74 (IFT74) is a core component of the intraflagellar transport (IFT), a multi-protein complex involved in the transport of ciliary proteins along axonemal microtubules. IFT proteins are found at the base of the cilium as well as inside the cilium, where they assemble into long arrays between the ciliary base and tip. Specifically, IFT74, together with IFT81, forms a tubulin-binding module that specifically mediates transport of tubulin within the cilium. IFT74 binds beta-tubulin via its basic region and is required for ciliogenesis.

[0119] Naturally occurring mutations in this gene are associated with Bardet-Biedl Syndrome and amyotrophic lateral sclerosis—frontotemporal dementia. (See, e.g., Lindstrand et al. Am. J. Hum. Genet. 99(2):318-336 (2016)).

[0120] The human IFT74 gene sequence is provided in GenBank Accession No. NG_053083.1, incorporated herein by reference. An exemplary human IFT74 nucleic acid sequence is provided in GenBank Accession No. NM_001099222.2, incorporated herein by reference. An exemplary amino acid sequence of human IFT74 is provided by Q96LB3-1, incorporated herein by reference. In an embodiment, the subject does not have or is not identified as having a genetic mutation or genetic defect in the IFT74 gene.

### Leucine Zipper Transcription Factor Like 1 (LZTFL1)

[0121] Leucine Zipper Transcription Factor Like 1 (LZTFL1), also known as BBS17, encodes a ubiquitously expressed protein that localizes to the cytoplasm. The protein interacts with Bardet-Biedl Syndrome (BBS) proteins and, through its interaction with BBS protein complexes, regulates protein trafficking to the ciliary membrane. LZTFL1 regulates ciliary localization of the BBSome complex and, together with the BBSome complex, controls SMO ciliary trafficking and contributes to the sonic hedgehog (SHH) pathway regulation.

[0122] Nonsense mutations in this gene are associated with a form of Bardet-Biedl Syndrome. (See, e.g., Deffert et al. Am. J. Med. Genet. A. 143A(2):208-213 (2007)). LZTFL1 may also function as a tumor suppressor; possibly by interacting with E-cadherin and the actin cytoskeleton and thereby regulating the transition of epithelial cells to mesenchymal cells. Alternative splicing of LZTFL1 results in multiple transcript variants.

[0123] The human LZTFL1 gene sequence is provided in GenBank Accession No. NG_033917.1, incorporated herein by reference. An exemplary human LZTFL1 nucleic acid sequence is provided in GenBank Accession No. NM_020347.4, incorporated herein by reference. An exemplary amino acid sequence of human LZTFL1 is provided by Q9NQ48-1, incorporated herein by reference. In an embodiment, the subject does not have or is not identified as having a genetic mutation or genetic defect in the LZTFL1 gene.

### MKS Transition Zone Complex Subunit 1 (MKS1)

[0124] MKS Transition Zone Complex Subunit 1 (MKS1), also known as BBS13, is a component of the tectonic-like complex, a complex localized at the transition zone of primary cilia and acting as a barrier that prevents diffusion of transmembrane proteins between the cilia and plasma membranes. MKS1 localizes to the basal body and is involved in centrosome migration to the apical cell surface during early ciliogenesis, is required for formation of the primary cilium in ciliated epithelial cells, and is required for ciliary structure and function, including a role in regulating length and appropriate number through modulating centrosome duplication. MKS1 is also required for cell branching morphology.

[0125] Mutations in this gene result in Meckel syndrome type 1 and in Bardet-Biedl syndrome type 13. (See, e.g., Xing et al. PLoS One 9(3):e90599 (2014)). Multiple transcript variants encoding different isoforms have been identified for this gene.

[0126] The human MKS1 gene sequence is provided in GenBank Accession No. NG_013032.1, incorporated herein by reference. An exemplary human MKS1 nucleic acid sequence is provided in GenBank Accession No. NM_017777.4, incorporated herein by reference. An exemplary amino acid sequence of human MKS1 is provided by Q9NX30-1, incorporated herein by reference. In an embodiment, the subject does not have or is not identified as having a genetic mutation or genetic defect in the MKS1 gene.

### Tripartite Motif Containing 32 (TRIM32)

[0127] Tripartite Motif Containing 32 (TRIM32), also known as BBS11, is a member of the tripartite motif (TRIM) family. The protein encoded by the TRIM32 gene contains three zinc-binding domains, a RING, a B-box type 1 and a B-box type 2, and a coiled-coil region. The protein encoded by TRIM32 localizes to cytoplasmic bodies and to the nucleus, where it interacts with the activation domain of the HIV-1 Tat protein. The TRIM32 protein also has E3 ubiquitin ligase activity and has been shown to ubiquitinate DTNBP1 (dysbindin) and promotes its degradation. It may also ubiquitinate BBS2.

[0128] Mutations in TRIM32 have been associated with muscular dystrophy, limb-girdle, autosomal recessive 8, and Bardet-Biedl syndrome (See, e.g., Chiang et al. Proc. Natl. Acad. Sci. U.S.A. 103(16):3287-92 (2006)).

[0129] The human TRIM32 gene sequence is provided in GenBank Accession No. NG_011619.1, incorporated herein by reference. An exemplary human TRIM32 nucleic acid sequence is provided in GenBank Accession No. NM_012210.4, incorporated herein by reference. An exemplary amino acid sequence of human TRIM32 is provided by Q13049-1, incorporated herein by reference. In an embodiment, the subject does not have or is not identified as having a genetic mutation or genetic defect in the TRIM32 gene.

### WD Repeat Containing Planar Cell Polarity Effector (WDPCP)

[0130] WD Repeat Containing Planar Cell Polarity Effector (WDPCP), also known as BBS15, is a cytoplasmic WD40 repeat protein. WDPCP is proposed to act as a planar cell polarity protein, which plays a critical role in collective cell movement and ciliogenesis by mediating septin localization. Together with FUZ, WDPCP is proposed to function as core component of the CPLANE (ciliogenesis and planar polarity effectors) complex involved in the recruitment of peripheral IFT-A proteins to basal bodies.

[0131] Mutations in this gene are associated with Bardet-Biedl syndrome and may also play a role in Meckel-Gruber syndrome. (See, e.g., Kim et al. Science 329(5997):1337-40 (2010)). Alternative splicing results in multiple transcript variants.

[0132] The human WDPCP gene sequence is provided in GenBank Accession No. NG_028144.2, incorporated herein by reference. An exemplary human WDPCP nucleic acid sequence is provided in GenBank Accession No. NM_001042692.3, incorporated herein by reference. An exemplary amino acid sequence of human WDPCP is provided by 095876-1, incorporated herein by reference. In an embodiment, the subject does not have or is not identified as having a genetic mutation or genetic defect in the WDPCP gene.

### Ribosomal Protein S6Kinase A3 (RPS6KA3)

[0133] Ribosomal Protein S6 Kinase A3 (RPS6KA3) is a member of the RSK (ribosomal S6 kinase) family of serine/threonine kinases that acts downstream of ERK (MAPK1/ERK2 and MAPK3/ERK1) signaling and mediates mitogenic and stress-induced activation of the transcription factors CREB131, ETV1/ER81, and NR4A1/NUR77, regulates translation through RPS6 and EIF4B phosphorylation, and mediates cellular proliferation, survival, and differentiation by modulating mTOR signaling and repressing pro-apoptotic function of BAD and DAPK1. In fibroblasts, RPS6KA3 is required for EGF-stimulated phosphorylation of CREB1 and histone H3 at ‘Ser-10’, which results in the subsequent transcriptional activation of several immediate-early genes. In response to mitogenic stimulation (EGF and PMA), RPS6KA3 phosphorylates and activates NR4A1/NUR77 and ETV1/ER81 transcription factors and the cofactor CREBBP. Upon insulin-derived signal, RPS6KA3 acts indirectly on the transcription regulation of several genes by phosphorylating GSK3B at ‘Ser-9’ and inhibiting its activity. RPS6KA3 also phosphorylates RPS6 in response to serum or EGF via an mTOR-independent mechanism and promotes translation initiation by facilitating assembly of the preinitiation complex. In response to insulin, RPS6KA3 phosphorylates EIF4B, enhancing EIF413 affinity for the EIF3 complex and stimulating cap-dependent translation. RPS6KA3 is involved in the mTOR nutrient-sensing pathway by directly phosphorylating TSC2 at ‘Ser-1798’, which potently inhibits TSC2 ability to suppress mTOR signaling, and mediates phosphorylation of RPTOR, which regulates mTORCi activity and may promote rapamycin-sensitive signaling independently of the PI3K/ARKT pathway. RPS6KA3 mediates cell survival by phosphorylating the pro-apoptotic proteins BAD and DAPK1 and suppressing their pro-apoptotic function. RPS6KA3 promotes the survival of hepatic stellate cells by phosphorylating CEBPB in response to the hepatotoxin carbon tetrachloride (CC14). RPS6KA3 is also involved in cell cycle regulation by phosphorylating the CDK inhibitor CDKN1B, which promotes CDKN1B association with 14-3-3 proteins and prevents its translocation to the nucleus and inhibition of G1 progression. In LPS-stimulated dendritic cells, RPS6KA3 is involved in TLR4-induced macropinocytosis, and in myeloma cells, it acts as effector of FGFR3-mediated transformation signaling, after direct phosphorylation at Tyr-529 by FGFR3. RPS6KA3 negatively regulates EGF-induced MAPK1/3 phosphorylation via phosphorylation of SOS1. RPS6KA3 phosphorylates SOS1 at ‘Ser-134’ and ‘Ser-1161’ that create YWHAB and YWHAE binding sites and which contribute to the negative regulation of MAPK1/3 phosphorylation and phosphorylates EPHA2 at ‘Ser-897’, the RPS6KA-EPHA2 signaling pathway controls cell migration.

[0134] Mutations in this gene have been associated with Coffin-Lowry syndrome (CLS), a rare X-linked semi-dominant syndrome characterized by severe psychomotor retardation, facial dysmorphism, digit abnormalities, and progressive skeletal deformations. (See, e.g., Delaunoy et al. Clin. Genet. 70(2): 161-6 (2006)).

[0135] The human RPS6KA3 gene sequence is provided in GenBank Accession No. NG_007488.1, incorporated herein by reference. An exemplary human RPS6KA3 nucleic acid sequence is provided in GenBank Accession No. NM_004586.3, incorporated herein by reference. An exemplary amino acid sequence of human RPS6KA3 is provided by P51812-1, incorporated herein by reference. In an embodiment, the subject does not have or is not identified as having a genetic mutation or genetic defect in the RPS6KA3 gene.

### 5-Hydroxytryptanine Receptor 2C (HTR2C)

[0136] 5-Hydroxytryptamine Receptor 2C (HTR2C) is a seven-transmembrane G-protein-coupled receptor for 5-hydroxytryptamine (serotonin). HTR2C also functions as a receptor for various drugs and psychoactive substances, including ergot alkaloid derivatives, 1-2,5,-dimethoxy-4-iodophenyl-2-aminopropane (DOI) and lysergic acid diethylamiide (LSD). Ligand binding causes a conformational change that triggers signaling via guanine nucleotide-binding proteins (G proteins) and modulates the activity of down-stream effectors. Beta-arrestin family members inhibit signaling via C proteins and mediate activation of alternative signaling pathways. Signaling activates a phosphatidylinositol-calcium second messenger system that modulates the activity of phosphatidylinositol 3-kinase and down-stream signaling cascades and promotes the release of Ca²⁻ ions from intracellular stores. HTR2C also regulates neuronal activity via the activation of short transient receptor potential calcium channels in the brain, and thereby modulates the activation of pro-opiomelacortin neurons and the release of CRH that then regulates the release of corticosterone. HTR2C plays a role in the regulation of appetite and eating behavior, responses to anxiogenic stimuli and stress, and also plays a role in insulin sensitivity and glucose homeostasis.

[0137] The mRNA of HTR2C is subject to multiple RNA editing events, where adenosine residues encoded by the genome are converted to inosines. RNA editing is predicted to alter the structure of the second intracellular loop, thereby generating alternate protein forms with decreased ability to interact with G proteins. Abnormalities in RNA editing of HTR2C have been detected in victims of suicide that suffer from depression. In addition, naturally occurring variation in the promoter and 5′ non-coding and coding regions of HTR2C may show statistically significant association with mental illness and behavioral disorders. Alternative splicing results in multiple different transcript variants. Mutations in HTR2C have been linked to hyperphagia, hyperactivity, and obesity. (See, e.g., Xu et al. Neuron. 60(4):582-9 (2008)).

[0138] The human HTR2C gene sequence is provided in GenBank Accession No. NG_012082.2, incorporated herein by reference. An exemplary human HTR2C nucleic acid sequence is provided in GenBank Accession No. NM_001256760.2, incorporated herein by reference. An exemplary amino acid sequence of human HTR2C is provided by P28335-1, incorporated herein by reference. In an embodiment, the subject does not have or is not identified as having a genetic mutation or genetic defect in the HTR2C gene.

### Kinase Suppressor of Ras 2 (KSR2)

[0139] Kinase Suppressor of Ras 2 (KSR2) is an intracellular scaffolding protein involved in multiple signaling pathways. In particular, KSR2 is a location-regulated scaffold connecting MEK to RAF. KSR2 has been shown to have very low protein kinase activity and can phosphorylate MAP2K1 at several Ser and Thr residues with very low efficiency in vitro. KSR2 acts as MAP2K1/MEK1-dependent allosteric activator of BRAF; upon binding to MAP2K1/MEK1, KSR2 dimerizes with BRAF and promotes BRAY-mediated phosphorylation of MAP2K1/MK1 (See, e.g., Lavoie et al. Nature 554:549-553(2018)). Interaction with BRAF enhances KSR2-mediated phosphorylation of MAP2K1 in vitro. KSR2blocks MAP3K8 kinase activity and MAP3K8-mediated signaling. KSR2 also acts as a negative regulator of MAP31K3-mediated activation of ERK, JN1K and NF-kappa-B pathways, inhibiting MAP3K3-mediated interleukin-8 production.

[0140] Mutations in KSR2 are linked to hyperphagia in childhood, low heart rate, reduced basal metabolic rate and severe insulin resistance, suggesting that KSR2 is an important regulator of energy intake, energy expenditure, and substrate utilization in humans. (See, e.g., Pearce et al. Cell. 155(4):765-77 (2013)).

[0141] The human KSR2 gene sequence is provided within GenBank Accession No. NC_000012.12, incorporated herein by reference. An exemplary human KSR2 nucleic acid sequence is provided in GenBank Accession No. NM_173598.6, incorporated herein by reference. An exemplary amino acid sequence of human KSR2 is provided by Q6VAB6-1, incorporated herein by reference. In an embodiment, the subject does not have or is not identified as having a genetic mutation or genetic defect in the KSR2 gene.

### Prokineticin 2 (PROK2)

[0142] The prokineticin 2 (PROK2) gene encodes a protein expressed in the suprachiasmatic nucleus (SCN) circadian clock that may function as the output component of the circadian clock. The secreted form of the encoded protein may also serve as a chemoattractant for neuronal precursor cells in the olfactory bulb. Proteins from other vertebrates which are similar to the PROK2 gene product were isolated based on homology to snake venom; secretions from frog skin and have been shown to have diverse functions.

[0143] Mutations in PROK2 are associated with hypogonadotropic hypogonadism 4 with or without anosmia and Kallmann syndrome. Multiple transcript variants encoding different isoforms have been found for this gene. (See, e.g., Dode et al. PLoS Genet. 2(10):e175 (2006)).

[0144] The human PROK2 gene sequence is provided in GenBank Accession No. NG_008275.1, incorporated herein by reference. An exemplary human PROK2 nucleic acid sequence is provided in GenBank Accession No. NM_001126128.2, incorporated herein by reference. An exemplary amino acid sequence of human PROK2 is provided by Q9HC23-1, incorporated herein by reference. In an embodiment, the subject does not have or is not identified as having a genetic mutation or genetic defect in the PROK2 gene.

### Ras-Related Protein Rab-23 (RA B23)

[0145] Ras-Related Protein Rab-23 (RAB23) is a small GTPase of the Ras superfamily. The small GTPases Rab are involved in the regulation of diverse cellular functions associated with intracellular membrane trafficking, including autophagy and immune response to bacterial infection. Rabs cycle between an inactive GDP-bound form and an active GTP-bound form that is able to recruit to membranes different set of downstream effectors directly responsible for vesicle formation movement, tethering, and fusion. Together with SUFU, the protein encoded by RAB23 prevents nuclear import of GLI1, and thereby inhibits GLI1 transcription factor activity. RAB23 also regulates GLI1 in differentiating chondrocytes, regulates GLI3 proteolytic processing, and modulates GL12 and GLI3 transcription factor activity. RAB23 also plays a role in autophagic vacuole assembly, and mediates defense against pathogens, such as S. aureus, by promoting their capture by autophagosomes that then merge with lysosomes. RAB23 may play a role in central nervous system development by antagonizing sonic hedgehog signaling.

[0146] Mutations in RAB23 have been associated with cancer and Carpenter syndrome, a pleiotropic disorder with autosomal recessive inheritance, the cardinal features of which include craniosynostosis, polysyndactyly, obesity, and cardiac defects. (See, e.g., Jenkins et al. Am. J. Hum. Genet. 80(6):1162-70 (2007)). Alternative splicing results in multiple transcript variants.

[0147] The human RAB23 gene sequence is provided in GenBank Accession No. NG_012170.1, incorporated herein by reference. An exemplary human RAB23 nucleic acid sequence is provided in GenBank Accession No. NM_016277.5, incorporated herein by reference. An exemplary amino acid sequence of human RAB23 is provided by Q9ULC3-1, incorporated herein by reference. In an embodiment, the subject does not have or is not identified as having a genetic mutation or genetic defect in the RAB23 gene.

### Melanocortin 2 Receptor Accessory Protein 2 (MRAP2)

[0148] Melanocortin 2 Receptor Accessory Protein 2 (MRAP2) is a G-protein-coupled receptor accessory protein that modulates melanocortin receptor signaling and is involved in energy homeostasis. The encoded protein has been shown to interact with all known melanocortin receptors and may regulate both receptor trafficking and activation in response to ligands. MRAP2 is thought to play a central role in the control of energy homeostasis and body weight regulation by increasing ligand-sensitivity of MC4R and MC4R-mediated generation of cAMV. MRAP2 may also act as a negative regulator of MC2R (e.g., by competing with MRAP for binding to MC2R and impairs the binding of corticotropin (ACTH) to MC2R). MRAP2 may also regulate activity of other melanocortin receptors (MC1R, MC3R and MC5R). MRAP2 has been implicated in energy control in rodents, notably via the melanocortin-4 receptor.

[0149] Deficiencies in MRAP2 have been associated with obesity (e.g., monogenic hyperphagic obesity, hyperglycemia, and hypertension) in both children and adults. (See, e.g., Baron et al. Nat. Med. 25(11):1733-1738 (2019)).

[0150] The human MRAP2 gene sequence is provided in GenBank Accession No. NG_051944.1, incorporated herein by reference. An exemplary human MRAP2 nucleic acid sequence is provided in GenBank Accession No. NM_138409.4, incorporated herein by reference. An exemplary amino acid sequence of human MRAP2 is provided by Q96G30-1, incorporated herein by reference. In an embodiment, the subject does not have or is not identified as having a genetic mutation or genetic defect in the MRAP2 gene.

### AF4 FMR2 Family Member 4 (AFF4)

[0151] AF4/FMR2 family member 4 (AFF4) is a component of the positive transcription elongation factor b (P-TEFb) complex, a core component of the super elongation complex (SEC), which is required to increase the catalytic rate of RNA polymerase R transcription by suppressing transient pausing by the polymerase at multiple sites along the DNA. In the SEC complex, AFF4 acts as a central scaffold that recruits other factors through direct interactions with ELL proteins (e.g., ELL, ELL2, or ELL3) and the P-TEFb complex. In case of infection by IV-1 virus, the SEC complex is recruited by the viral Tat protein to stimulate viral gene expression.

[0152] Chromosomal aberrations involving ATF4 have been found in acute lymphoblastic leukemia (ALL). Missense mutations in AFF4 have been associated with CHOPS syndrome (C for cognitive impairment and coarse facies, H for heart defects, 0 for obesity, P for pulmonary involvement and S for short stature and skeletal dysplasia). (See, e.g., Izumi et al. Nat. Genet. 47(4):338-44 (2015)).

[0153] The human AFF4 gene sequence is provided in GenBank Accession No. NG_030340.1, incorporated herein by reference. An exemplary human AFF4 nucleic acid sequence is provided in GenBank Accession No. NM_014423.4, incorporated herein by reference. An exemplary amino acid sequence of human AFF4 is provided by Q9UHB7-1, incorporated herein by reference. In an embodiment, the subject does not have or is not identified as having a genetic mutation or genetic defect in the AFF4 gene.

### Adenylate Cyclase 3 (ADCY3)

[0154] Adenylate cyclase 3 (ADCY3) is a membrane-associated enzyme and catalyzes the formation of the secondary messenger cyclic adenosine monophosphate (cAMP). ADCY3 catalyzes the formation of the signaling molecule cAMP in response to G-protein signaling and participates in signaling cascades triggered by odorant receptors via its function in cAMP biosynthesis. ADCY3 is required for the perception of odorants, for normal sperm motility, and normal male fertility. ADCY3 also plays a role in regulating insulin levels and body fat accumulation in response to a high fat diet. ADCY3 is widely expressed in various human tissues and may be involved in a number of physiological and pathophysiological metabolic processes. Two transcript variants encoding different isoforms have been identified for ADCY3.

[0155] Loss of function mutations in ADCY4 have been associated with monogenic severe obesity. (See, e.g., Saeed et al. Nat. Genet. 50(2):175-179 (2018)).

[0156] The human ADCY3 gene sequence is provided within GenBank Accession No. NC_000002.12, incorporated herein by reference. An exemplary human ADCY3 nucleic acid sequence is provided in GenBank Accession No. NM_001320613.2, incorporated herein by reference. An exemplary amino acid sequence of human ADCY3 is provided by 060266-1, incorporated herein by reference. In an embodiment, the subject does not have or is not identified as having a genetic mutation or genetic defect in the ADCY3 gene.

### TUB Bipartite Transcription Factor (TUB)

[0157] TUB Bipartite Transcription Factor (TUB) is a member of the Tubby family of bipartite transcription factors that functions in signal transduction from heterotrimeric G protein-coupled receptors. The crystal structure has been determined for a similar protein in mouse, which functions as a membrane-bound transcription regulator that translocates to the nucleus in response to phosphoinositide hydrolysis. TUB binds to membranes containing phosphatidylinositol 4,5-bisphosphate and has been shown to bind DNA in vitro. TUB may contribute to the regulation of transcription in the nucleus and could be involved in the hypothalamic regulation of body weight. TUB contributes to stimulation of phagocytosis of apoptotic retinal pigment epithelium (RPE) cells and macrophages. Two transcript variants encoding distinct isoforms have been identified for this gene.

[0158] Mutations in TUB have been associated with obesity and retinal dystrophy (e.g., characterized by obesity, night blindness, decreased visual acuity, and electrophysiological features of a rod cone dystrophy). (See, e.g., Borman et al. Hum. Mutat. 35(3):289-93 (2014)).

[0159] The human TUB gene sequence is provided in GenBank Accession No. NG_029912.1, incorporated herein by reference. An exemplary human TUB nucleic acid sequence is provided in GenBank Accession No. NM_003320.4, incorporated herein by reference. An exemplary amino acid sequence of human TUB is provided by P50607-1, incorporated herein by reference. In an embodiment, the subject does not have or is not identified as having a genetic mutation or genetic defect in the TUB gene.

### Orthopedia Homeobox (OTP)

[0160] Orthopedia Homeobox (OTP) is a member of the homeodomain (HD) family. HD family proteins are helix-turn-helix transcription factors that play key roles in the specification of cell fates. OTP may function during brain development, specifically in the differentiation of hypothalamic neuroendocrine cells. OTP is also believed to be involved in mammalian energy homeostasis and behavior.

[0161] Disruption of OTP has been associated with obesity, marasmus, Kwashiorkor, and anxiety (See, e.g., Moir et al. Mol. Metab. 6(11):1419-1428 (2017)).

[0162] The human OTP gene sequence is provided within GenBank Accession No. NC_000005.10, incorporated herein by reference. An exemplary human OTP nucleic acid sequence is provided in GenBank Accession No. NM_032109.3, incorporated herein by reference. An exemplary amino acid sequence of human OTP is provided by Q5XKR4-1, incorporated herein by reference. In an embodiment, the subject does not have or is not identified as having a genetic mutation or genetic defect in the OTP gene.

### G-Protein Coupled Receptor 101 (GPR101)

[0163] G-Protein Coupled Receptor 101 (GPR101) is an orphan G protein-coupled receptor of largely unknown function. The encoded protein is a member of a family of proteins that contain seven transmembrane domains and transduce extracellular signals through heterotrimeric G proteins.

[0164] Diseases associated with GPR101 include Pituitary Adenoma 2, Growth Hormone-Secreting and Chromosome Xq26.3 Duplication Syndrome. Neuronal GLP1Rs has been shown to mediate body weight and anorectic effects of liraglutide but are not required for glucose-lowering effects. (See, e.g., Sisley et al. J. Clin. Invest. 124(6):2456-63 (2014)).

[0165] The human GPR101 gene sequence is provided in GenBank Accession No. NG_016367.1, incorporated herein by reference. An exemplary human GPR101 nucleic acid sequence is provided in GenBank Accession No. NM_054021.2, incorporated herein by reference. An exemplary amino acid sequence of human GPR101 is provided by Q96P66-1, incorporated herein by reference. In an embodiment, the subject does not have or is not identified as having a genetic mutation or genetic defect in the GPR101 gene.

### T-Box Transcription Factor 3 (TBX3)

[0166] T-Box Transcription Factor 3 (TBX3) is a member of a phylogenetically conserved family of genes that share a common DNA-binding domain, the T-box. T-box genes encode transcription factors involved in the regulation of developmental processes. TBX3 is a transcriptional repressor and is thought to play a role in the anterior/posterior axis of the tetrapod forelimb. TBX3 acts as a negative regulator of PML function in cellular senescence. TBX3 may also play a role in limb pattern formation. Alternative splicing of this gene results in three transcript variants encoding different isoforms.

[0167] Mutations that disrupt the DNA-binding domain of TBX3 have been associated with Ulnar-mammary syndrome (UMS), a pleiotropic disorder affecting limb, apocrine-gland, tooth, hair, and genital development. (See, e.g., Bamshad et al. Am. J. Hum. Genet. 64(6):1550-62 (1999)).

[0168] The human TBX3 gene sequence is provided in GenBank Accession No. NG_008315.1, incorporated herein by reference. An exemplary human TBX3 nucleic acid sequence is provided in GenBank Accession No. NM_016569.4, incorporated herein by reference. An exemplary amino acid sequence of human TBX3 is provided by 015119-1, incorporated herein by reference. In an embodiment, the subject does not have or is not identified as having a genetic mutation or genetic defect in the TBX3 gene.

[0169] In embodiments ofany method described herein, the method comprises treating a subject having a mutation in a gene listed in Table 2 below. In embodiments, a method described herein comprises use of a MC4R agonist described herein to treat a subject a non-genetic obesity, e.g., a subject that does not have a mutation in an MC4R pathway agonizable gene, e.g., as listed in Table 2. In embodiments, a method described herein comprises use of a MC4R agonist described herein to treat a subject having a mutation in an MC4R pathway agonizable gene, e.g., as listed in Table 2. Table 2 describes exemplary genes, alleles, transcripts, and proteins, though other genes, alleles, transcripts, and proteins may be included.

TABLE 2
Exemplary MC4R pathway agonizable
genes, alleles, and transcripts

| | NCBI Reference (exemplary | UniProt Reference |
|---|---|---|
| Gene Name | transcripts) | (Amino Acid) |
| ARL6 | NM_001278293.3 | Q9H0F7 |
| RAI1 | NM_030665.4 | Q7Z5J4-1 |
| SRC1 | NM_003743.5 | Q15788-1 |
| BBS19 | NM_001177701.3 | Q9BW83-1 |
| BBS21 | NM_177965.4 | Q96NL8-1 |
| CEP290 | NM_025114.4 | O15078-1 |
| IFT74 | NM_001099222.2 | Q96LB3-1 |
| LZTFL1 | NM_020347.4 | Q9NQ48-1 |
| MKS1 | NM_017777.4 | Q9NXB0-1 |
| TRIM32 | NM_012210.4 | Q13049-1 |
| WDPCP | NM_001042692.3 | O95876-1 |
| RPS6KA3 | NM_004586.3 | P51812-1 |
| HTR2C | NM_001256760.2 | P28335-1 |
| KSR2 | NM_173598.6 | Q6VAB6-1 |
| PROK2 | NM_001126128.2 | Q9HC23-1 |
| RAB23 | NM_016277.5 | Q9ULC3-1 |
| MRAP2 | NM_138409.4 | Q96G30-1 |
| AFF4 | NM_014423.4 | Q9UHB7-1 |
| ADCY3 | NM_001320613.2 | O60266-1 |
| TUB | NM_003320.4 | P50607-1 |
| OTP | NM_032109.3 | Q5XKR4-1 |
| GPR101 | NM_054021.2 | Q96P66-1 |
| TBX3 | NM_016569.4 | O15119-1 |

### Additional MC4R Pathway Agonizable Genes

[0170] Additional MC4R pathway agonizable genes useful in the methods disclosed herein are described as follows:

[0171] Acyl-CoA Binding Domain Containing 7 (ACBD7), also known as BA455B2.2, has been associated with food intake, energy expenditure, and body weight in preclinical models. (See, e.g., Lanfray et al. Elife. 15; 5:e11742 (2016)).

[0172] Agouti Related Neuropeptide (AGRP), also known as ASIP2, has been associated with hyperphagia and obesity. (See, e.g., Carroll et al. Clin. Dermatol. 22(4):345-9 (2004)).

[0173] Cell Adhesion Molecule 1 (CADM1), also known as TSLC1 or IGSF4, has been associated with obesity. (See, e.g., Rathjen et al. Nat. Neurosci. 20(8):1096-1103 (2017)).

[0174] Cell Adhesion Molecule 2 (CADM2), also known as IGSF4D, has been associated with obesity. (See e.g., Li et al. Hum. Genet. 132(7):793-801 (2013)).

[0175] Cocaine and Amphetamine-Regulated Transcript Protein (CARTPT), also known as CART, has been associated with obesity. (See, e.g., Asnicar et al. Endocrinology. 42(10):4394-400 (2001)).

[0176] Coiled-Coil Domain Containing 28B (CCDC28B) has been associated with Bardet-Biedl syndrome. (See, e.g., Novas et al. Sic. Rep. 14; 8(1):3019 (2018)).

[0177] Cholecystokinin (CCK), also known as Prepro-Cholecystokinin, has been associated with obesity and body mass index. (See, e.g., Namjou et al. Front. Genet. 3; 4:268 (2013)).

[0178] Cannabinoid Receptor 1 (CNR1), also known as CNR, has been associated with obesity and body fat mass and distribution. (See, e.g., Russo et al. J. Endocrinol. Metab. 92(6):2382-6 (2007)).

[0179] CREB Binding Protein (CREBBP), also known as RSTS, has been associated with Rubinstein-Taybi syndrome. (See, e.g., Stevens et al. Am. J. Med. Genet. A. 155A(7):1680-4 (2011)).

[0180] CREB3 Regulatory Factor (CREBRF), also known as C₅orf41, has been associated with obesity and diabetes. (See, e.g., Hanson et al. Diabetologia. 62(9):1647-1652 (2019)).

[0181] Cullin 4B (CUL4B), also known as KIAA0695, MRXHF2, MRXS15, MRXSC, and SFM2, has been associated with mental retardation, X-linked, syndromic 15 (Cabezas type). (See, e.g., Tarpey et al. Am. J. Hum. Genet. 80(2):345-52 (2007)).

[0182] DNA Methyltransferase 3 Alpha (DNMT3A), also known as HESJAS and TBRS, encodes a protein involved in de novo methylation. (See, e.g., Xie S. et al. Gene 236(1):87-95 (1999)).

[0183] Dual Specificity Tyrosine Phosphorylation Regulated Kinase 1B (DYRKIB), also known as Minibrain-related kinase, has been associated with abdominal obesity-metabolic syndrome 3. (See, e.g., Keramati et al. N. Engl. J. Med. 15; 370(20):1909-1919 (2014)).

[0184] Ectonucleotide Pyrophosphatase/Phosphodiesterase 1 (ENPP1), also known as NPPS, M6S1, and PDNP1, has been associated with obesity. (See, e.g., Valli-Jaakola et al. Obesity. 16(9):2113-9 (2008)).

[0185] E1A Binding Protein P300 (EP300), also known as Histone Acetyltransferase P300, has been associated with Rubinstein-Taybi syndrome. (See, e.g., Stevens et al. Am. J. Med. Genet. A. 155A(7):1680-4 (2011)).

[0186] FMRP Translational Regulator 1 (FMR1), also known as POF1 and POF, has been associated with Fragile X Syndrome. (See, e.g., Raspa et al. Am. J. Intelelct. Devv. Disabil. 115(6):482-95 (2010)).

[0187] FTO Alpha-Ketoglutarate Dependent Dioxygenase (FTO), also known as FTO Alpha-Ketoglutarate Dependent Dioxygenase, has been associated with obesity-related traits including body mass index, hip circumference, and weight. (See e.g., Scuteri et al. PLoS. Genet. 3(7):e115 (2007)).

[0188] Ghrelin and Obestatin Prepropeptide (GHRL), also known as Prepro-Appetite Regulatory Hormone, has been associated with obesity. (See, e.g., J. Clin. Endocrinol. Metab. 87(8):4005-8 (2002)).

[0189] Gastric Inhibitory Polypeptide Receptor (GIPR), also known as GIP-R and PGQTL2, has been associated with body mass index and energy intake and expenditure pathways in obesity. (See, e.g., Turcot et al. Nat. Genet. 50(1):26-41 (2018)).

[0190] Glucagon Like Peptide 1 Receptor (GLP1R), also known as GLP-1, has been associated with food intake and body weight regulation. (See, e.g., Sisley et al. J. Clin. Invest. 124(6):2456-63 (2014).

[0191] Inositol Polyphosphate-5-Phosphatase E (INPP5E), also known as JBTS1, has been associated with Jourbert syndrome and MORM syndrome, an autosomal recessive congenital disorder characterized by mental retardation, truncal obesity, retinal dystrophy, and micropenis. (See, e.g., Jacoby et al. Nat. Genet. 41(9):1027-31 (2009)).

[0192] Insulin (INS), also known as IDDM2 and IDDM1, has been associated with body mass index and obesity. (See, e.g., Antnnez-Ortiz et al. Biomed. Res. Int. 2017:2432957 (2017)).

[0193] Insulin Induced Gene 2 (INSIG2), also known as Insulin Induced Protein 2, has been associated with feedback control of lipid synthesis and obesity in children. (See, e.g., Kaulfers et al. PLoS One 10(1):e0116340 (2015)).

[0194] Insulin Receptor Substrate 1 (IRS1), also known as HIRS-1, has been associated with obesity, type II diabetes, and susceptibility to insulin resistance. (See, e.g., Clausen et al. Lancet. 346(8972):397-402 (1995)).

[0195] Insulin Receptor Substrate 4 (IRS4), also known as Pp160, CHNG9, PY160, and Py160, has been associated with obesity, hyperglycemia, and insulin resistance. (See, e.g., Sadagurski et al. Mol. Metab. 23; 3(1):55-63 (2013)).

[0196] Insulin Gene Enhancer Protein (ISL1), also known as Islet-1 and Isl-1, is a member of the LlM/homeodomain family of transcription factors, and mutations in this gene have been associated with, inter alia, maturity-onset diabetes. (See, e.g., Tanizawa Y et al. Diabetes (1994)).

[0197] Methyl-CpG Binding Protein 2 (MeCP2), also known as AUTSX3, MRXS13, MRX16, RTS, and RTT, encodes a nuclear protein related to onset of Rett syndrome, a progressive neurologic developmental disorder. Amir, R. E. et al. Nat Genet 23(2):185-8 (1999)

[0198] Neuropilin 1 (NRP1), also known as CD304 and BDCA4, encodes one of two neuropilins involved in signaling pathways that control cell migration. NRP1 is associated with cerebral arteriopathy, autosomal dominant, and neuroma. (See, e.g., Soker, S. et al Cell 92(6):735-745).

[0199] Neuropilin 2 (NRP2), also known as NPN2, NP2, and PR02714, may play a role in cardiovascular development, axon guidance, and tumorigenesis. (See, e.g., Chen, H. et al. Neuron 19(3):547-549 (1997)).

[0200] RPGRIP1L Like (RPGRIP1L), also known as FTM, PPP1R134, CORS3, MKS5, JBTS7, and KIAA1005, has been found to interact with neprocystin-4. Defects in this gene have been associated with Joubert syndrome type 7 and Meckel syndrome type 5 (Nagase, T et al DNA Res 6(1):63-70 (1999)).

[0201] Plexin A1 (PLXNA1), also known as NOV and PLXN1, is associated with hereditary congenital facial paresis and nephronophthisis 4. (See, e.g., Maestrini, E. et al. Proc Natl Acad Sci USA 93(2):674-678 (1996)).

[0202] Plexin A2 (PLXNA2), also known as OCT, KIAA0463, and FLJ11751, is a plexin-A family member believed to be related to signal transduction from semaphorin-3A and semaphorin-3B. (See, e.g., also Coric, V. et al. Depress Anxiety 27(5):417-425 (2010)).

[0203] Plexin A3 (PLXNA3), also known as XAP-6, is involved in cytoskeletal remodeling and apoptosis. This gene has been shown to be important in axon pathfinding in developing nervous systems and is associated with tumor progression. (See, e.g., Maestrini, L. et al. Proc Natl Acad Sci USA 93(2):674-678 (1996)).

[0204] Plexin A4 (PLXNA4), also known as FAYV2820, KIAA1550, and PRO34003, is associated with various signal transduction pathways, particularly involving semaphorin-3A and semaphorin-3B. (See, e.g., Imboden, M. J Allergy Clin Immunol 129(5):1218-1228 (2012)).

[0205] Potassium Channel Tetramerization Domain Containing 15 (KCTD15), also known as BTB/POZ Domain-Containing Protein KCTD15, has been associated with body mass index and obesity in children. (See, e.g., Zhao et al. Obesity 17(12):2254-7 (2009)).

[0206] Kinase D Interacting Substrate 220 (KIDINS220), also known as ARMS, KIAA1250, and SINO, has been associated with spastic paraplegia, intellectual disability, nystagmus, and obesity. (See, e.g., Josifova et al. Hum. Mol. Genet. 25(11):2158-2167 (2016)).

[0207] Melanin Concentrating Hormone Receptor 1 (MCHR1), also known as GPR24, has been associated with regulation of food intake and body weight. (See, e.g., Marsh et al. Proc. Natl. Acad. Sci. U.S.A. 5; 99(5):3240-5 (2002)).

[0208] Methionine Sulfoxide Reductase A (MSRA), also known as PMSR, has been associated with several obesity-related traits in children. (See, e.g., Albuquerque et al. J. Hum. Genet. 59(6):307-13 (2014)).

[0209] Necdin, MAGE Family Member (NDN), also known as PWCR, has been associated with Prader-Willi syndrome. (See, e.g., Jay et al. Nat. Genet. 17(3):357-61 (1997)).

[0210] Neuronal Growth Regulator 1 (NEGR1), also known as Neurotractin, IGLON4, DMML2433, KILON, and Ntra, has been associated with body mass index. (See, e.g., Zhao et al. Obesity. 17(12):2254-7 (2009)).

[0211] Neuroligin 2 (NLGN2), also known as KIAA1366, has been associated with anxiety, autism, intellectual disability, hyperphagia, and obesity. (See, e.g., Am. J. Med. Genet. A. 173(1):213-216 (2017)).

[0212] Neuropeptide Y (NPY), also known as PYY4, has been associated with obesity. (See, e.g., van Rossum et al. Int. J. Obes. 30(10):1522-8 (2006)).

[0213] Nuclear Receptor Subfamily 0 Group B Member 2 (NROB2), also known as SHP1, has been associated with mild and early-onset obesity. (See, e.g., Nishigori et al. PNAS. 16; 98(2):575-80 (2001)).

[0214] Neurotrophic Receptor Tyrosine Kinase 2 (NTRK2), also known as Trk-B, has been associated with severe obesity and developmental delay (e.g., NTRK2 deficiency obesity). (See, e.g., Yeo et al. Nat. Neurosci. 7(11):1187-9 (2004)).

[0215] Opioid Receptor Mu 1 (OPRM1), also known as MOR1, MOP, LMOR, OPRM, and HMOP, has been associated with associated with metabolism and the MC4R pathway (See, e.g., Olszewski et al. Neuroreport 12(8):1727-1730 (2001)).

[0216] Pericentrin (PCNT), also known as Kendrin and PCNT2, has been associated with Majewski osteodysplastic primordial dwarfism type II. (See, e.g., Rauch et al. Science. 8; 319(5864):816-9 (20008)).

[0217] Pleckstrin Homology Domain Interacting Protein (PHIP), also known as WDR11, Ndrp, DCAF14, BRWD2. (See, e.g., Webster et al. Cold Spring Harb Mol Case Stud 2(6):a001172 (2016).

[0218] Proprotein Convertase Subtilisin/Kexin Type 2 (PCSK2), also known as NEC2, has been associated with glucose homeostasis, food intake, ultimately body mass. (See, e.g., Anini et al. Int. J. Obes. 34(11):1599-607 (2010)).

[0219] PHD Finger Protein 6 (PHF6), also known as BFLS and BORJ, has been associated with Borjeson-Forssman-Lehman syndrome, a syndrome characterized by moderate to severe mental retardation, epilepsy, hypogonadism, hypometabolism, obesity with marked gynecomastia, swelling of subcutaneous tissue of the face, narrow palpebral fissure, and large but not deformed ears. (See, e.g., Lower et al. Nat. Genet. 32(4):661-5 (2002)).

[0220] Pro-Melanin Concentrating Hormone (PMCH), also known as MCH and PpMCH, has been associated with regulation of food intake and body weight. (See, e.g., Shimada et al. Nature. 396(6712):670-4 (1998)).

[0221] Peroxisome Proliferator Activated Receptor Gamma (PPARG), also known as NR1C3, PPARG1, PPARG2, CIMT1, and GLM1, has been associated with obesity in children and adolescents. (See, e.g., Ochoa et al. Int. J. Obes. Relat. Metab. Disord. 28 Suppl 3:S37-41 (2004)).

[0222] Peptide YY (PYY), also known as Peptide Tyrosine Tyrosine, has been associated with regulation of food intake and obesity. (See, e.g., Ahituv et al. Hum. Mol. Genet. 1; 15(3):387-91 (2006)).

[0223] Syndecan 3 (SDC3), also known as SDCN, has been associated with energy balance, obesity, body mass index, and LHDL cholesterol. (See, e.g., Chang et al. Int. J. Endocrinol. 30; 2018:9282598 (2018)).

[0224] SEC16 Homolog B, Endoplasmic Reticulum Export Factor (SEC16B), also known as LZTR2, has been associated with body mass index. (See, e.g., Felix et al. Hum. Mol. Genet. 15; 25(2):389-403 (2016)).

[0225] Solute Carrier Family 6 Member 14 (SLC6A14), also known as BMIQ11, has been associated with body mass index and obesity. (See, e.g., Suviolahti et al. J. Clin. Invest. 112(11):1762-72 (2003)).

[0226] Small Nuclear Ribonucleoprotein Polypeptide N (SNRPN), also known as PWCR, has been associated with Prader-Willi Syndrome. (See, e.g., Kuslich et al. Am. J. Hum. Genet. 64(1):70-6 (1999)).

[0227] Thyroid Hormone Receptor Beta (THRB), also known as ERBA2 and PRTH, has been associated with regulation of food intake and body weight. (See e.g., Amorim et al. J. Endocrinol. 203(2):291-9 (2009)).

[0228] Transient Receptor Potential Cation Channel Subfamily C Member 5 (TRPC5), also known as PPP1R159, TRP-5, HTRP5. (see, e.g., Sossey-Alaoui, K et al. Genomics 60(3):330-3340 (1999)).

[0229] Transmembrane Protein 18 (TMEM18), also known as LncND, has been associated with body mass index and body weight regulation. (See, e.g., Willer et al. Nat. Genet. 41(1):25-34 (2009)).

[0230] Transmembrane Protein 67 (TMEM67), also known as MKS3, has been associated with Bardet-Biedl Syndrome. (See, e.g., Leitch et al. Nat. Genet. 40(4):443-8 (2008)).

[0231] Trafficking Protein Particle Complex 9 (TRAPPC9), also known as NIBP, has been associated with mental retardation, autosomal recessive 13. (See, e.g., Marangi et al. Eur. J. Hum. Genet. 21(2):229-32 (2013)).

[0232] Uncoupling Protein 1 (UCP1), also known as thermogenin, SLC25A7, and UCP, has been associated with obesity. (See, e.g., Ramos et al. BMC Med. Genet. 7; 13:101 (2012)).

[0233] Uncoupling Protein 3 (UCP3), also known as SLC25A9, has been associated with metabolic fuel partitioning and obesity. (See, e.g., Argyropoulos et al. J. Clin. Invest. 1; 102(7):1345-51 (1998)).

[0234] Vacuolar Protein Sorting 13 Homolog B (VPS13B), also known as CHS1 and COH1, has been associated with Cohen syndrome, an autosomal recessive disorder with variability in the clinical manifestations, characterized by mental retardation, postnatal microcephaly, facial dysmorphism, pigmentary retinopathy, myopia, and intermittent neutropenia. (See, e.g., Seifert et al. J. Med. Genet. 43(5):e22 (2006)).

[0235] In an embodiment, the MC4R pathway agonizable gene comprises POMC, PCSK1, LEPR, LEP, SDCCAG8, SH2B1, CPE, ALMS1, BBS1, BBS2, BBS4, BBS5, BBS6, BBS7, BBS8, BBS9, BBS10, BBS12, BBS18, BBS20, GNAS, MC3R, NHLH2, SIM1, BDNF, NTRK2, MAGEL2, or a 16p11.2 deletion. In an embodiment, the subject does not have a genetic mutation or genetic variant in a gene selected from POMC, PCSK1, LEPR, LEP, SDCCAG8, SH2B1, CPE, ALMS1, BBS1, BBS2, BBS4, BBS5, BBS6, BBS7, BBS8, BBS9, BBS10, BBS12, BBS18, BBS20, GNAS, MC3R, NHLH2, SIM1, BDNF, NTRK2, and MAGEL2, or a 16p11.2 deletion.

### Obesity

[0236] The present disclosure features methods for treating a subject having obesity, e.g., a non-genetic obesity. In an embodiment, the obesity is hypothalamic obesity. In an embodiment, the obesity is due to a disease, disorder, or condition relating to an MC4R pathway agonizable gene. In an embodiment, the disease, disorder, or condition is characterized by a mutation (e.g., a substitution mutation, a deletion mutation, or a polymorphism) in the MC4R pathway agonizable gene. In embodiments, the methods comprise administering to the subject an MC4R agonist or compositions described herein, e.g., a compound of any one of Formulas (I), (II), (III), (IV), (V), (VI), (VII), (VIII), (IX), (X), (XI), or (XII), (e.g., as described herein) or a pharmaceutically acceptable salt thereof. In an embodiment, the MC4R agonist is setmelanotide (i.e., Ac-Arg-c(Cys-D-Ala-His-D-Phe-Arg-Trp-Cys)-NH₂ (SEQ ID NO: 140))

### Hypothalamic Obesity

[0237] Hypothalamic obesity (HO) is a form of obesity caused by physical or inherited damage to the hypothalamus, resulting in symptoms such as uncontrollable hunger, rapid and/or excessive weight gain, and a low metabolic rate. The hypothalamus is responsible for regulating energy balance and body weight by integrating metabolic information that governs the drive for food intake and energy expenditure, primarily via signaling through the MC4 receptor (MC4R), which has been identified as the critical melanocortin receptor involved in the regulation of body weight, hunger, and energy homeostasis (Holland 2019). Recently, MRI findings in patients with HO displayed anatomical disruption of the hypothalamus which contains MC4 receptors and POMC neurons residing in the arcuate nuclei and in the paraventricular nucleus, respectively.

[0238] Damage to the arcuate nucleus, paraventricular nucleus, dorsomedial nucleus, and dorsal hypothalamic area most commonly results in impairments in regulation of both peripheral energy expenditure and satiety (Abuzzahab 2019). This impairment in the MC4R pathway may lead to a high degree of sudden, severe, and sustained weight gain which is unresponsive to general lifestyle changes or current anti-obesity pharmacotherapies (Sterkenburg 2015). Approximately 50% of patients with HO also manifest with a marked increase in hunger. A key difference from other disease entities which may originate due to impairment to the MC4 pathway is that in the case of HO, the impairment is due to structural damage, whereas in the other diseases it is due to a genetic impairment; several genetic variants have been associated with reduced signalling through the MC4 pathway, a reduction in a-MSH and consequent hyperphagia and obesity.

[0239] In addition to tumor (e.g., craniopharyngiomas, gliomas, pituitary adenomas, hamartomas), and/or the surgery or radiation therapy used to treat the tumor (Hochberg 2010), other much rarer causes of injury include inflammatory conditions involving the hypothalamus or trauma. Craniopharyngiomas represent the most common tumor associated with the development of HO and accounts for 5% to 15% of pediatric intracranial tumors (Muller 2022). A bimodal age distribution has been observed for new cases of craniopharyngioma with a first peak seen in children aged 4 to 14 years and a second peak in adults ages >40 years (Ostrom 2021).

[0240] Other causes for this condition include swelling in the brain, head trauma, brain surgery, or the presence of certain genetic mutations. Genetic mutations in the LEP, LEPR, POMC, MC4R, and CART genes may also lead to this disease (see, e.g., Kim et al. Ann Pediatr Endocrinol Metab (2013) 18(4): 161-167). Hypothalamic obesity has also been linked to diminished α-MSH levels (see, e.g., Roth et al. Metabol Clin Exper (2010) 59:186-194).

[0241] Hypothalamic obesity is a distinct disease that differs from general obesity (e.g., a genetic obesity or other non-genetic obesity or a syndromic disease). For example, HO is most often the result of an acquired injury as opposed to a genetically driven impairment in the MC4R pathway which results in a decrease in the hormone α-MSH. In addition, a subject that has or is identified as having HO may exhibit a dramatic shift in clinical phenotype compared to a subject having general obesity (e.g., a genetic obesity or other non-genetic obesity or a syndromic disease), such as rapid weight gain, increased hunger, and decreased energy dating from the time of the injury. Further, a subject that has or is identified as having HO often does not present with a secondary or additional disease manifestations that frequently characterizes some genetic obesities.

[0242] In an embodiment, the subject has obesity, e.g., hypothalamic obesity, wherein the fasting peripheral α-MSH is between about 4 to about 10 fmol/mL relative to the fasting peripheral α-MSH of between about 15 to about 30 fmol/mL of a healthy non-obese subject. In an embodiment, the subject has obesity, e.g., hypothalamic obesity, wherein the fasting peripheral α-MSH is between about 4 to about 9, 4 to about 8, 4 to about 7, 4 to about 6, or 4 or to about 5 fmol/mL relative to the fasting peripheral α-MSH of between about 15 to about 30 fmol/mL of a healthy non-obese subject. In an embodiment, the subject has obesity, e.g., hypothalamic obesity, wherein the fasting peripheral α-MSH is between about 4 to about 9 fmol/mL relative to the fasting peripheral α-MSH of between about 15 to about 30 fmol/mL of a healthy non-obese subject. In an embodiment, the subject has obesity, e.g., hypothalamic obesity, wherein the fasting peripheral α-MSH is between about 4 to about 8 fmol/mL relative to the fasting peripheral α-MSH of between about 15 to about 30 fmol/mL of a healthy non-obese subject. In an embodiment, the subject has obesity, e.g., hypothalamic obesity, wherein the fasting peripheral α-MSH is between about 4 to about 7 fmol/mL relative to the fasting peripheral α-MSH of between about 15 to about 30 fmol/mL of a healthy non-obese subject. In an embodiment, the subject has obesity, e.g., hypothalamic obesity, wherein the fasting peripheral α-MSH is between about 4 to about 6 fmol/mL relative to the fasting peripheral α-MSH of between about 15 to about 30 fmol/mL of a healthy non-obese subject. In an embodiment, the subject has obesity, e.g., hypothalamic obesity, wherein the fasting peripheral α-MSH is between about 4 to about 5 fmol/mL relative to the fasting peripheral α-MSH of between about 15 to about 30 fmol/mL of a healthy non-obese subject.

[0243] In an embodiment, the subject has obesity, e.g., hypothalamic obesity, wherein the fasting peripheral α-MSH is less than 10 fmol/mL relative to the fasting peripheral α-MSH of between about 15 to about 30 fmol/mL of a healthy non-obese subject. In an embodiment, the subject has obesity, e.g., hypothalamic obesity, wherein the fasting peripheral α-MSH is less than 9, 8, 7, 6, 5 or 4 fmol/mL relative to the fasting peripheral α-MSH of between about 15 to about 30 fmol/mL of a healthy non-obese subject. In an embodiment, the subject has obesity, e.g., hypothalamic obesity, wherein the fasting peripheral α-MSH is less than 9 fmol/mL relative to the fasting peripheral α-MSH of between about 15 to about 30 fmol/mL of a healthy non-obese subject. In an embodiment, the subject has obesity, e.g., hypothalamic obesity, wherein the fasting peripheral α-MSH is less than 8 fmol/mL relative to the fasting peripheral α-MSH of between about 15 to about 30 fmol/mL of a healthy non-obese subject. In an embodiment, the subject has obesity, e.g., hypothalamic obesity, wherein the fasting peripheral α-MSH is less than 7 fmol/mL relative to the fasting peripheral α-MSH of between about 15 to about 30 fmol/mL of a healthy non-obese subject. In an embodiment, the subject has obesity, e.g., hypothalamic obesity, wherein the fasting peripheral α-MSH is less than 6 fmol/mL relative to the fasting peripheral α-MSH of between about 15 to about 30 fmol/mL of a healthy non-obese subject. In an embodiment, the subject has obesity, e.g., hypothalamic obesity, wherein the fasting peripheral α-MSH is less than 5 fmol/mL relative to the fasting peripheral α-MSH of between about 15 to about 30 fmol/mL of a healthy non-obese subject. In an embodiment, the subject has obesity, e.g., hypothalamic obesity, wherein the fasting peripheral α-MSH is less than 4 fmol/mL relative to the fasting peripheral α-MSH of between about 15 to about 30 fmol/mL of a healthy non-obese subject.

[0244] In an embodiment, the subject has obesity, e.g., hypothalamic obesity, wherein the fasting peripheral α-MSH is less than 4 fmol/mL relative to the fasting peripheral α-MSH of between about 15 to about 30 fmol/mL of a healthy non-obese subject.

[0245] In an embodiment, the subject has obesity, e.g., hypothalamic obesity, that is unresponsive to lifestyle modification (e.g., alterations in diet or exercise). In an embodiment, the subject has obesity, e.g., hypothalamic obesity, that is unresponsive to a modification in diet. In an embodiment, the subject has obesity, e.g., hypothalamic obesity, that is unresponsive to caloric restriction. In an embodiment, the subject has obesity, e.g., hypothalamic obesity, that is unresponsive to a reduction in food intake. In an embodiment, the subject has obesity, e.g., hypothalamic obesity, that is unresponsive to increased physical exercise, e.g., increased caloric expenditure achieved during exercise.

[0246] In an embodiment, the subject has obesity, e.g., hypothalamic obesity, characterized by a decrease in resting energy expenditure (REE) in the absence of hyperphagia. In an embodiment, the subject has obesity, e.g., hypothalamic obesity, characterized by a decrease in resting energy expenditure (REE) in the absence of hyperphagia, wherein the daily most hunger score of the subject is statistically equivalent, e.g., within the standard error of the measurement, to the daily most hunger score of the of the subject prior to the development of hypothalamic obesity in the subject. In an embodiment, the subject has obesity, e.g., hypothalamic obesity, characterized by a decrease in resting energy expenditure (REE) in the absence of hyperphagia, wherein the weekly average of the daily most hunger score is subject is statistically equivalent, e.g., within the standard error of the measurement, to the weekly average of the daily most hunger score of the of the subject prior to the development of hypothalamic obesity in the subject. In an embodiment, the subject has obesity, e.g., hypothalamic obesity, characterized by a decrease in resting energy expenditure (REE) in the absence of hyperphagia, wherein the daily most hunger score of the subject is not clinically meaningful, e.g., less than 2 points, relative to the daily most hunger score of the of the subject prior to the development of hypothalamic obesity in the subject. In an embodiment, the subject has obesity, e.g., hypothalamic obesity, characterized by a decrease in resting energy expenditure (REE) in the absence of hyperphagia, wherein the weekly average of the daily most hunger score is subject is not clinically meaningful, e.g., less than 2 points, relative to the weekly average of the daily most hunger score of the of the subject prior to the development of hypothalamic obesity in the subject. In an embodiment, the subject has obesity, e.g., hypothalamic obesity, characterized by a decrease in resting energy expenditure (REE) in the absence of hyperphagia, wherein the change in the IWQOL or IQWOL-Lite score of the subject is not clinically meaningful, relative to the IWQOL or IQWOL-Lite score of the subject prior to the development of hypothalamic obesity in the subject.

[0247] In an embodiment, the subject has obesity, e.g., hypothalamic obesity, characterized by a decrease in resting energy expenditure in the presence of hyperphagia. In an embodiment, the subject has obesity, e.g., hypothalamic obesity, characterized by a decrease in resting energy expenditure (REE) in the presence of hyperphagia, wherein the increase in the daily most hunger score of the subject is clinically meaningful, e.g., greater than 2 points, relative to the daily most hunger score of the of the subject prior to the development of hypothalamic obesity in the subject. In an embodiment, the subject has obesity, e.g., hypothalamic obesity, characterized by a decrease in resting energy expenditure (REE) in the presence of hyperphagia, wherein the increase in the weekly average of the daily most hunger score in the subject is clinically meaningful, e.g., greater than 2 points, relative to the weekly average of the daily most hunger score of the of the subject prior to the development of hypothalamic obesity in the subject. In an embodiment, the subject has obesity, e.g., hypothalamic obesity, characterized by a decrease in resting energy expenditure (REE) in the presence of hyperphagia, wherein the decrease in the IWQOL or IQWOL-Lite score of the subject is clinically meaningful, relative to the IWQOL or IQWOL-Lite score of the subject prior to the development of hypothalamic obesity in the subject.

[0248] In an embodiment, the subject has obesity, e.g., hypothalamic obesity, characterized by a decrease in resting energy expenditure and a reduction in physical activity in the absence of hyperphagia. In an embodiment, the subject has obesity, e.g., hypothalamic obesity, characterized by a decrease in resting energy expenditure (REE) and a reduction in physical activity in the absence of hyperphagia, wherein the daily most hunger score of the subject is statistically equivalent, e.g., within the standard error of the measurement, to the daily most hunger score of the of the subject prior to the development of hypothalamic obesity in the subject. In an embodiment, the subject has obesity, e.g., hypothalamic obesity, characterized by a decrease in resting energy expenditure (REE) and a reduction in physical activity in the absence of hyperphagia, wherein the weekly average of the daily most hunger score is subject is statistically equivalent, e.g., within the standard error of the measurement, to the weekly average of the daily most hunger score of the of the subject prior to the development of hypothalamic obesity in the subject. In an embodiment, the subject has obesity, e.g., hypothalamic obesity, characterized by a decrease in resting energy expenditure (REE) and a reduction in physical activity in the absence of hyperphagia, wherein the daily most hunger score of the subject is not clinically meaningful, e.g., less than 2 points, relative to the daily most hunger score of the of the subject prior to the development of hypothalamic obesity in the subject. In an embodiment, the subject has obesity, e.g., hypothalamic obesity, characterized by a decrease in resting energy expenditure (REE) and a reduction in physical activity in the absence of hyperphagia, wherein the weekly average of the daily most hunger score is subject is not clinically meaningful, e.g., less than 2 points, relative to the weekly average of the daily most hunger score of the of the subject prior to the development of hypothalamic obesity in the subject. In an embodiment, the subject has obesity, e.g., hypothalamic obesity, characterized by a decrease in resting energy expenditure (REE) and a reduction in physical activity in the absence of hyperphagia, wherein the change in the IWQOL or IQWOL-Lite score of the subject is not clinically meaningful, relative to the IWQOL or IQWOL-Lite score of the subject prior to the development of hypothalamic obesity in the subject.

[0249] In an embodiment, the subject has obesity, e.g., hypothalamic obesity, characterized by a decrease in resting energy expenditure and a reduction in physical activity in the presence of hyperphagia. In an embodiment, the subject has obesity, e.g., hypothalamic obesity, characterized by a decrease in resting energy expenditure (REE) and a reduction in physical activity in the presence of hyperphagia, wherein the increase in the daily most hunger score of the subject is clinically meaningful, e.g., greater than 2 points, relative to the daily most hunger score of the of the subject prior to the development of hypothalamic obesity in the subject. In an embodiment, the subject has obesity, e.g., hypothalamic obesity, characterized by a decrease in resting energy expenditure (REE) and a reduction in physical activity in the presence of hyperphagia, wherein the increase in the weekly average of the daily most hunger score in the subject is clinically meaningful, e.g., greater than 2 points, relative to the weekly average of the daily most hunger score of the of the subject prior to the development of hypothalamic obesity in the subject. In an embodiment, the subject has obesity, e.g., hypothalamic obesity, characterized by a decrease in resting energy expenditure (REE) and a decrease in physical activity in the presence of hyperphagia, wherein the decrease in the IWQOL or IQWOL-Lite score of the subject is clinically meaningful, relative to the IWQOL or IQWOL-Lite score of the subject prior to the development of hypothalamic obesity in the subject.

[0250] In an embodiment, the subject has obesity, e.g., hypothalamic obesity, that is unresponsive to bariatric surgery. In an embodiment, the subject has obesity, e.g., hypothalamic obesity, that is unresponsive to a bariatric surgery procedure including gastric bypass, gastric band, gastric sleeve, duodenal switch, gastric balloon, and intestinal barrier, inter alia. In an embodiment, the subject has obesity, e.g., hypothalamic obesity, that is unresponsive to a gastric bypass procedure. In an embodiment, the subject has obesity, e.g., hypothalamic obesity, that is unresponsive to a gastric band procedure. In an embodiment, the subject has obesity, e.g., hypothalamic obesity, that is unresponsive to a gastric sleeve procedure. In an embodiment, the subject has obesity, e.g., hypothalamic obesity, that is unresponsive to a duodenal switch procedure. In an embodiment, the subject has obesity, e.g., hypothalamic obesity, that is unresponsive to gastric balloon procedure. In an embodiment, the subject has obesity, e.g., hypothalamic obesity, that is unresponsive to an intestinal barrier procedure.

[0251] In an embodiment, the subject has obesity, e.g., hypothalamic obesity, that is unresponsive to pharmacologic therapy, e.g., therapy with sympathomimetic agents, somatostatin analogs, analogs of glucagon-like peptide (GLP-1), metformin, a combination of metformin and fenofibrate, a combination metformin and diazoxide, central nervous system (CNS) stimulants, and melatonin. In an embodiment, the subject has obesity, e.g., hypothalamic obesity, that is unresponsive to pharmacologic therapy comprising sympathomimetic agents. In an embodiment, the subject has obesity, e.g., hypothalamic obesity, that is unresponsive to pharmacologic therapy comprising somatostatin analogs. In an embodiment, the subject has obesity, e.g., hypothalamic obesity, that is unresponsive to pharmacologic therapy comprising analogs of glucagon-like peptide (GLP-1). In an embodiment, the subject has obesity, e.g., hypothalamic obesity, that is unresponsive to pharmacologic therapy comprising metformin. In an embodiment, the subject has obesity, e.g., hypothalamic obesity, that is unresponsive to pharmacologic therapy comprising a combination of metformin and fenofibrate. In an embodiment, the subject has obesity, e.g., hypothalamic obesity, that is unresponsive to pharmacologic therapy comprising a combination of metformin and diazoxide. In an embodiment, the subject has obesity, e.g., hypothalamic obesity, that is unresponsive to pharmacologic therapy comprising central nervous system (CNS) stimulants. In an embodiment, the subject has obesity, e.g., hypothalamic obesity, that is unresponsive to pharmacologic therapy comprising melatonin.

[0252] Additional diseases, disorders, or conditions that may be treated by administration of an MC4R agonist or compositions described herein, e.g., a compound of any one of Formulas (I), (II), (III), (IV), (V), (VI), (VII), (VIII), (IX), (X), (XI), or (XII), (e.g., as described herein) or a pharmaceutically acceptable salt thereof include 5p3 microduplication syndrome, Angelman syndrome, Chudley Lowry syndrome, Cornelia de Lange syndrome, Laron syndrome, Kleefstra syndrome/9q34.3, Camera-Marugo-Cohen syndrome, Clark and Baraitser XLMR syndrome, DiGeorge syndrome, velocardiofacial syndrome, conotruncal anomaly face syndrome, 22q11.2 deletion syndrome, rapid onset obesity with hypothalamic dysfunction (ROHHAD), rapid onset obesity with hypothalamic dysfunction, hypoventilation, autonomic dysregulation and neural crest tumor (ROHHAD NET), Shashi XLMR syndrome, mental retardation, epileptic seizures, hypogonadism and -genitalism, microcephaly, obesity (MEHMO) syndrome, mandibular prognathism with eye and skin anomalies (MOMES) syndrome, and MOMO syndrome. Additional diseases, disorders, or conditions that may be treated by administration of an MC4R agonist, e.g., an MC4R agonist described herein, include those summarized in Kaur et al (2017) Obesity Reviews 18:603-634.

### Outcomes

[0253] In embodiments, methods described herein result in one or more outcomes, including a reduction of weight (e.g., body weight), a reduction in hunger level, no detectable decrease in energy expenditure (e.g., resting energy expenditure), an increase in energy expenditure (e.g., resting energy expenditure), a reduction in daily/weekly/monthly food intake, a reduction in waist circumference, no detectable increase in blood pressure, or a reduction in blood pressure in a subject, e.g., relative to a control.

[0254] In embodiments, the control is the measurement of the parameter in the subject prior to administration of (treatment with) a MC4R agonist. In embodiments, the control is a predetermined value, e.g., the value of the parameter in an average obese human population, e.g., of like age and gender as the subject; or the value of the parameter measured in the subject at a previous time point (e.g., at a previous visit, e.g., to a physician, medical facility or laboratory).

[0255] In embodiments, the outcome (e.g., the reduction, increase, no detectable decrease, or no detectable increase in a given parameter) is measured in the subject 1, 2, 3, 4, 5, 6, 7, 8, 9, 10 weeks or more after initiation of treatment with a MC4R agonist. In other embodiments, the outcome (e.g., the reduction, increase, no detectable decrease, or no detectable increase in a given parameter) is measured in the subject over a period of time (e.g., over a period of 1-2 weeks, 2-4 weeks, 4-6 weeks, 6-8 weeks, 8-12 weeks, or 12-16 weeks) during a course of treatment.

[0256] In embodiments, methods described herein result in a reduction of weight (e.g., body weight) in the subject compared to a control (e.g., weight of the subject before treatment or a predetermined value, e.g., average weight of an obese human population of like age and gender as the subject not subjected to therapeutic intervention, or the weight of the subject at a previous measurement, e.g., at a previous visit). In embodiments, the reduction is about 1 kg to 3 kg after 1 week of treatment, about 1 kg to 6 kg after 2 weeks of treatment, about 2 kg to 12 kg after 4 weeks of treatment, about 4 kg to 24 kg after 8 weeks of treatment, or about 8 kg to 48 kg after 16 weeks of treatment. In embodiments, the reduction is at a rate of loss of about 1-2 kg/week, e.g., about 2 kg/week, e.g., over a period of 1-2 weeks of treatment or longer, 2-4 weeks of treatment or longer, 4-8 weeks of treatment or longer, 8-16 weeks of treatment, or 16-32 weeks of treatment, or longer.

[0257] Measurement of weight, e.g., body weight, can be performed using standard methods in the art.

[0258] In embodiments, the reduction in weight is characterized by a percentage change in the subject's weight, e.g., body weight, compared to a control (e.g., the percentage change in weight, e.g., body weight, of the subject before treatment or a predetermined value, e.g., the percentage change from the average weight of an obese human population of like age and gender as the subject not subjected to therapeutic intervention, or the percentage change from the weight of the subject at a previous measurement, e.g., at a previous visit).

[0259] A subject may experience a reduction in weight upon administration of the MC4R agonist (e.g., an MC4R agonist described herein, e.g., SEQ ID NO: 140). For example, the subject may experience a reduction in weight of greater than 1% upon administration of the MC4R agonist (e.g., an MC4R agonist described herein, e.g., SEQ ID NO: 140). In an embodiment, the subject experiences a reduction in weight of 2%, 3%, 4%, 5%, 6%, 7%, 8%, 9%, 10%, 12.5%, 15%, 17.5%, 20%, 22.5%, 25%, 30%, 35%, 40%, or more relative to the weight of the subject prior to administration of the MC4R agonist (e.g., an MC4R agonist described herein, e.g., SEQ ID NO: 140). In an embodiment, the subject experiences a reduction in weight of greater than 2% relative to the weight of the subject prior to administration of the MC4R agonist (e.g., an MC4R agonist described herein, e.g., SEQ ID NO: 140). In an embodiment, the subject experiences a reduction in weight of greater than 3% relative to the weight of the subject prior to administration of the MC4R agonist (e.g., an MC4R agonist described herein, e.g., SEQ ID NO: 140). In an embodiment, the subject experiences a reduction in weight of greater than 4% relative to the weight of the subject prior to administration of the MC4R agonist (e.g., an MC4R agonist described herein, e.g., SEQ ID NO: 140). In an embodiment, the subject experiences a reduction in weight of greater than 5% relative to the weight of the subject prior to administration of the MC4R agonist (e.g., an MC4R agonist described herein, e.g., SEQ ID NO: 140). In an embodiment, the subject experiences a reduction in weight of greater than 6% relative to the weight of the subject prior to administration of the MC4R agonist (e.g., an MC4R agonist described herein, e.g., SEQ ID NO: 140). In an embodiment, the subject experiences a reduction in weight of greater than 7% relative to the weight of the subject prior to administration of the MC4R agonist (e.g., an MC4R agonist described herein, e.g., SEQ ID NO: 140). In an embodiment, the subject experiences a reduction in weight of greater than 8% relative to the weight of the subject prior to administration of the MC4R agonist (e.g., an MC4R agonist described herein, e.g., SEQ ID NO: 140). In an embodiment, the subject experiences a reduction in weight of greater than 9% relative to the weight of the subject prior to administration of the MC4R agonist (e.g., an MC4R agonist described herein, e.g., SEQ ID NO: 140). In an embodiment, the subject experiences a reduction in weight of greater than 10% relative to the weight of the subject prior to administration of the MC4R agonist (e.g., an MC4R agonist described herein, e.g., SEQ ID NO: 140). In an embodiment, the subject experiences a reduction in weight of greater than 12.5% relative to the weight of the subject prior to administration of the MC4R agonist (e.g., an MC4R agonist described herein, e.g., SEQ ID NO: 140). In an embodiment, the subject experiences a reduction in weight of greater than 15% relative to the weight of the subject prior to administration of the MC4R agonist (e.g., an MC4R agonist described herein, e.g., SEQ ID NO: 140). In an embodiment, the subject experiences a reduction in weight of greater than 17.5% relative to the weight of the subject prior to administration of the MC4R agonist (e.g., an MC4R agonist described herein, e.g., SEQ ID NO: 140). In an embodiment, the subject experiences a reduction in weight of greater than 20% relative to the weight of the subject prior to administration of the MC4R agonist (e.g., an MC4R agonist described herein, e.g., SEQ ID NO: 140). In an embodiment, the subject experiences a reduction in weight of greater than 22.5% relative to the weight of the subject prior to administration of the MC4R agonist (e.g., an MC4R agonist described herein, e.g., SEQ ID NO: 140). In an embodiment, the subject experiences a reduction in weight of greater than 25% relative to the weight of the subject prior to administration of the MC4R agonist (e.g., an MC4R agonist described herein, e.g., SEQ ID NO: 140). In an embodiment, the subject experiences a reduction in weight of greater than 30% relative to the weight of the subject prior to administration of the MC4R agonist (e.g., an MC4R agonist described herein, e.g., SEQ ID NO: 140). In an embodiment, the subject experiences a reduction in weight of greater than 35% relative to the weight of the subject prior to administration of the MC4R agonist (e.g., an MC4R agonist described herein, e.g., SEQ ID NO: 140). In an embodiment, the subject experiences a reduction in weight of greater than 40% relative to the weight of the subject prior to administration of the MC4R agonist (e.g., an MC4R agonist described herein, e.g., SEQ ID NO: 140).

[0260] In an embodiment, the subject experiences a reduction in weight greater than 40% relative to the weight of the subject prior to administration of the MC4R agonist (e.g., an MC4R agonist described herein, e.g., SEQ ID NO: 140).

[0261] In an embodiment, the subject experiences a reduction in weight between about 1% to about 40% relative to the weight of the subject prior to administration of the MC4R agonist (e.g., an MC4R agonist described herein, e.g., SEQ ID NO: 140). In an embodiment, the subject experiences a reduction in weight of between about 1% to about 35%, 1% to about 30%, 1% to about 25%, 1% to about 22.5%, 1% to about 20%, 1% to about 17.5%, 1% to about 15%, 1% to about 12.5%, 1% to about 10%, 1% to about 9%, 1% to about 8%, 1% to about 7%, 1% to about 6%, 1% to about 5%, 1% to about 4%, 1% to about 3%, or between 1% to about 2% relative to the weight of the subject prior to administration of the MC4R agonist (e.g., an MC4R agonist described herein, e.g., SEQ ID NO: 140). In an embodiment, the subject experiences a reduction in weight of between about 1% to about 35% relative to the weight of the subject prior to administration of the MC4R agonist (e.g., an MC4R agonist described herein, e.g., SEQ ID NO: 140). In an embodiment, the subject experiences a reduction in weight of between about 1% to about 30% relative to the weight of the subject prior to administration of the MC4R agonist (e.g., an MC4R agonist described herein, e.g., SEQ ID NO: 140). In an embodiment, the subject experiences a reduction in weight of between about 1% to about 25% relative to the weight of the subject prior to administration of the MC4R agonist (e.g., an MC4R agonist described herein, e.g., SEQ ID NO: 140). In an embodiment, the subject experiences a reduction in weight of between about 1% to about 22.5% relative to the weight of the subject prior to administration of the MC4R agonist (e.g., an MC4R agonist described herein, e.g., SEQ ID NO: 140). In an embodiment, the subject experiences a reduction in weight of between about 1% to about 20% relative to the weight of the subject prior to administration of the MC4R agonist (e.g., an MC4R agonist described herein, e.g., SEQ ID NO: 140). In an embodiment, the subject experiences a reduction in weight of between about 1% to about 17.5% relative to the weight of the subject prior to administration of the MC4R agonist (e.g., an MC4R agonist described herein, e.g., SEQ ID NO: 140). In an embodiment, the subject experiences a reduction in weight of between about 1% to about 15% relative to the weight of the subject prior to administration of the MC4R agonist (e.g., an MC4R agonist described herein, e.g., SEQ ID NO: 140). In an embodiment, the subject experiences a reduction in weight of between about 10% to about 12.5% relative to the weight of the subject prior to administration of the MC4R agonist (e.g., an MC4R agonist described herein, e.g., SEQ ID NO: 140). In an embodiment, the subject experiences a reduction in weight of between about 1% to about 10% relative to the weight of the subject prior to administration of the MC4R agonist (e.g., an MC4R agonist described herein, e.g., SEQ ID NO: 140). In an embodiment, the subject experiences a reduction in weight of between about 1% to about 9% relative to the weight of the subject prior to administration of the MC4R agonist (e.g., an MC4R agonist described herein, e.g., SEQ ID NO: 140). In an embodiment, the subject experiences a reduction in weight of between about 1% to about 8% relative to the weight of the subject prior to administration of the MC4R agonist (e.g., an MC4R agonist described herein, e.g., SEQ ID NO: 140). In an embodiment, the subject experiences a reduction in weight of between about 1% to about 7% relative to the weight of the subject prior to administration of the MC4R agonist (e.g., an MC4R agonist described herein, e.g., SEQ ID NO: 140). In an embodiment, the subject experiences a reduction in weight of between about 1% to about 6% relative to the weight of the subject prior to administration of the MC4R agonist (e.g., an MC4R agonist described herein, e.g., SEQ ID NO: 140). In an embodiment, the subject experiences a reduction in weight of between about 1% to about 5% relative to the weight of the subject prior to administration of the MC4R agonist (e.g., an MC4R agonist described herein, e.g., SEQ ID NO: 140). In an embodiment, the subject experiences a reduction in weight of between about 1% to about 4% relative to the weight of the subject prior to administration of the MC4R agonist (e.g., an MC4R agonist described herein, e.g., SEQ ID NO: 140). In an embodiment, the subject experiences a reduction in weight of between about 1% to about 3% relative to the weight of the subject prior to administration of the MC4R agonist (e.g., an MC4R agonist described herein, e.g., SEQ ID NO: 140). In an embodiment, the subject experiences a reduction in weight of between about 1% to about 2% relative to the weight of the subject prior to administration of the MC4R agonist (e.g., an MC4R agonist described herein, e.g., SEQ ID NO: 140).

[0262] In an embodiment, the subject experiences a reduction in weight of between about 5% to about 40% relative to the weight of the subject prior to administration of the MC4R agonist (e.g., an MC4R agonist described herein, e.g., SEQ ID NO: 140). In an embodiment, the subject experiences a reduction in weight of between about 5% to about 35%, 5% to about 30%, 5% to about 25%, 5% to about 22.5%, 5% to about 20%, 5% to about 17.5%, 5% to about 15%, 5% to about 12.5%, 5% to about 10%, 5% to about 9%, 5% to about 8%, 5% to about 7% or between about 5% to about 6% relative to the weight of the subject prior to administration of the MC4R agonist (e.g., an MC4R agonist described herein, e.g., SEQ ID NO: 140). In an embodiment, the subject experiences a reduction in weight of between about 5% to about 35% relative to the weight of the subject prior to administration of the MC4R agonist (e.g., an MC4R agonist described herein, e.g., SEQ ID NO: 140). In an embodiment, the subject experiences a reduction in weight of between about 5% to about 30% relative to the weight of the subject prior to administration of the MC4R agonist (e.g., an MC4R agonist described herein, e.g., SEQ ID NO: 140). In an embodiment, the subject experiences a reduction in weight of between about 5% to about 25% relative to the weight of the subject prior to administration of the MC4R agonist (e.g., an MC4R agonist described herein, e.g., SEQ ID NO: 140). In an embodiment, the subject experiences a reduction in weight of between about 5% to about 22.5% relative to the weight of the subject prior to administration of the MC4R agonist (e.g., an MC4R agonist described herein, e.g., SEQ ID NO: 140). In an embodiment, the subject experiences a reduction in weight of between about 5% to about 20% relative to the weight of the subject prior to administration of the MC4R agonist (e.g., an MC4R agonist described herein, e.g., SEQ ID NO: 140). In an embodiment, the subject experiences a reduction in weight of between about 5% to about 17.5% relative to the weight of the subject prior to administration of the MC4R agonist (e.g., an MC4R agonist described herein, e.g., SEQ ID NO: 140). In an embodiment, the subject experiences a reduction in weight of between about 5% to about 15% relative to the weight of the subject prior to administration of the MC4R agonist (e.g., an MC4R agonist described herein, e.g., SEQ ID NO: 140). In an embodiment, the subject experiences a reduction in weight of between about 5% to about 12.5% relative to the weight of the subject prior to administration of the MC4R agonist (e.g., an MC4R agonist described herein, e.g., SEQ ID NO: 140). In an embodiment, the subject experiences a reduction in weight of between about 5% to about 10% relative to the weight of the subject prior to administration of the MC4R agonist (e.g., an MC4R agonist described herein, e.g., SEQ ID NO: 140). In an embodiment, the subject experiences a reduction in weight of between about 5% to about 9% relative to the weight of the subject prior to administration of the MC4R agonist (e.g., an MC4R agonist described herein, e.g., SEQ ID NO: 140). In an embodiment, the subject experiences a reduction in weight of between about 5% to about 8% relative to the weight of the subject prior to administration of the MC4R agonist (e.g., an MC4R agonist described herein, e.g., SEQ ID NO: 140). In an embodiment, the subject experiences a reduction in weight of between about 5% to about 7% relative to the weight of the subject prior to administration of the MC4R agonist (e.g., an MC4R agonist described herein, e.g., SEQ ID NO: 140). In an embodiment, the subject experiences a reduction in weight of between about 5% to about 6% relative to the weight of the subject prior to administration of the MC4R agonist (e.g., an MC4R agonist described herein, e.g., SEQ ID NO: 140).

[0263] In an embodiment, the subject experiences a reduction in BMI between about 10% to about 40% relative to the weight of the subject prior to administration of the MC4R agonist (e.g., an MC4R agonist described herein, e.g., SEQ ID NO: 140). In an embodiment, the subject experiences a reduction in weight between about 10% to about 35%, 10% to about 30%, 10% to about 25%, 10% to about 22.5%, 10% to about 20%, 10% to about 17.5%, 10% to about 15%, or between about 10% to about 12.5% relative to the weight of the subject prior to administration of the MC4R agonist (e.g., an MC4R agonist described herein, e.g., SEQ ID NO: 140). In an embodiment, the subject experiences a reduction in weight between about 10% to about 35% relative to the weight of the subject prior to administration of the MC4R agonist (e.g., an MC4R agonist described herein, e.g., SEQ ID NO: 140). In an embodiment, the subject experiences a reduction in weight between about 10% to about 30% relative to the weight of the subject prior to administration of the MC4R agonist (e.g., an MC4R agonist described herein, e.g., SEQ ID NO: 140). In an embodiment, the subject experiences a reduction in weight between about 10% to about 25% relative to the weight of the subject prior to administration of the MC4R agonist (e.g., an MC4R agonist described herein, e.g., SEQ ID NO: 140). In an embodiment, the subject experiences a reduction in weight between about 10% to about 22.5% relative to the weight of the subject prior to administration of the MC4R agonist (e.g., an MC4R agonist described herein, e.g., SEQ ID NO: 140). In an embodiment, the subject experiences a reduction in weight between about 10% to about 20% relative to the weight of the subject prior to administration of the MC4R agonist (e.g., an MC4R agonist described herein, e.g., SEQ ID NO: 140). In an embodiment, the subject experiences a reduction in weight between about 10% to about 17.5% relative to the weight of the subject prior to administration of the MC4R agonist (e.g., an MC4R agonist described herein, e.g., SEQ ID NO: 140). In an embodiment, the subject experiences a reduction in weight between about 10% to about 15% relative to the weight of the subject prior to administration of the MC4R agonist (e.g., an MC4R agonist described herein, e.g., SEQ ID NO: 140). In an embodiment, the subject experiences a reduction in weight between about 10% to about 12.5% relative to the weight of the subject prior to administration of the MC4R agonist (e.g., an MC4R agonist described herein, e.g., SEQ ID NO: 140).

[0264] In an embodiment, the subject experiences a reduction in weight between about 20% to 40% relative to the weight of the subject prior to administration of the MC4R agonist (e.g., an MC4R agonist described herein, e.g., SEQ ID NO: 140). In an embodiment, the subject experiences a reduction in BMI between about 20% to about 35%, 20% to about 30%, 20% to 25%, or between about 20% to about 22.5% relative to the weight of the subject prior to the administration of the MC4R agonist (e.g., an MC4R agonist described herein, e.g., SEQ ID NO: 140). In an embodiment, the subject experiences a reduction in weight between about 20% to 35% relative to the weight of the subject prior to the administration of the MC4R agonist (e.g., an MC4R agonist described herein, e.g., SEQ ID NO: 140). In an embodiment, the subject experiences a reduction in weight between about 20% to 30% relative to the weight of the subject prior to the administration of the MC4R agonist (e.g., an MC4R agonist described herein, e.g., SEQ ID NO: 140). In an embodiment, the subject experiences a reduction in weight between about 20% to 25% relative to the weight of the subject prior to the administration of the MC4R agonist (e.g., an MC4R agonist described herein, e.g., SEQ ID NO: 140). In an embodiment, the subject experiences a reduction in weight between about 20% to 22.5% relative to the weight of the subject prior to the administration of the MC4R agonist (e.g., an MC4R agonist described herein, e.g., SEQ ID NO: 140).

[0265] In an embodiment, the subject experiences a reduction in weight between about 20% to 40% relative to the weight of the subject prior to administration of the MC4R agonist (e.g., an MC4R agonist described herein, e.g., SEQ ID NO: 140). In an embodiment, the subject experiences a reduction in BMI between about 20% to about 39%, 20% to about 38%, 20% to about 37%, 20% to about 36%, 20% about 35%, 20% to about 34%, 20% to about 33%, 20% to about 32%, 20% to about 31%, 20% about 30%, 20% to 29%, 20% to about 28%, 20% to about 27%, 20% to about 26%, 20% to about 25%, 20% to about 24%, 20% to about 23%, 20% to about 22%, or between about 20% to about 21% relative to the weight of the subject prior to administration of the MC4R agonist (e.g., an MC4R agonist described herein, e.g., SEQ ID NO: 140). In an embodiment, the subject experiences a reduction in weight between about 20% to about 39% relative to the weight of the control prior to administration of the MC4R agonist (e.g., an MC4R agonist described herein, e.g., SEQ ID NO: 140). In an embodiment, the subject experiences a reduction in weight between about 20% to about 38% relative to the weight of the control prior to administration of the MC4R agonist (e.g., an MC4R agonist described herein, e.g., SEQ ID NO: 140). In an embodiment, the subject experiences a reduction in weight between about 20% to about 37% relative to the weight of the control prior to administration of the MC4R agonist (e.g., an MC4R agonist described herein, e.g., SEQ ID NO: 140). In an embodiment, the subject experiences a reduction in weight between about 20% to about 36% relative to the weight of the control prior to administration of the MC4R agonist (e.g., an MC4R agonist described herein, e.g., SEQ ID NO: 140). In an embodiment, the subject experiences a reduction in weight between about 20% to about 35% relative to the weight of the control prior to administration of the MC4R agonist (e.g., an MC4R agonist described herein, e.g., SEQ ID NO: 140). In an embodiment, the subject experiences a reduction in weight between about 20% to about 34% relative to the weight of the control prior to administration of the MC4R agonist (e.g., an MC4R agonist described herein, e.g., SEQ ID NO: 140). In an embodiment, the subject experiences a reduction in weight between about 20% to about 33% relative to the weight of the control prior to administration of the MC4R agonist (e.g., an MC4R agonist described herein, e.g., SEQ ID NO: 140). In an embodiment, the subject experiences a reduction in weight between about 20% to about 32% relative to the weight of the control prior to administration of the MC4R agonist (e.g., an MC4R agonist described herein, e.g., SEQ ID NO: 140). In an embodiment, the subject experiences a reduction in weight between about 20% to about 31% relative to the weight of the control prior to administration of the MC4R agonist (e.g., an MC4R agonist described herein, e.g., SEQ ID NO: 140). In an embodiment, the subject experiences a reduction in weight between about 20% to about 30% relative to the weight of the control prior to administration of the MC4R agonist (e.g., an MC4R agonist described herein, e.g., SEQ ID NO: 140). In an embodiment, the subject experiences a reduction in weight between about 20% to about 29% relative to the weight of the control prior to administration of the MC4R agonist (e.g., an MC4R agonist described herein, e.g., SEQ ID NO: 140). In an embodiment, the subject experiences a reduction in weight between about 20% to about 28% relative to the weight of the control prior to administration of the MC4R agonist (e.g., an MC4R agonist described herein, e.g., SEQ ID NO: 140). In an embodiment, the subject experiences a reduction in weight between about 20% to about 27% relative to the weight of the control prior to administration of the MC4R agonist (e.g., an MC4R agonist described herein, e.g., SEQ ID NO: 140). In an embodiment, the subject experiences a reduction in weight between about 20% to about 26% relative to the weight of the control prior to administration of the MC4R agonist (e.g., an MC4R agonist described herein, e.g., SEQ ID NO: 140). In an embodiment, the subject experiences a reduction in weight between about 20% to about 25% relative to the weight of the control prior to administration of the MC4R agonist (e.g., an MC4R agonist described herein, e.g., SEQ ID NO: 140). In an embodiment, the subject experiences a reduction in weight between about 20% to about 24% relative to the weight of the control prior to administration of the MC4R agonist (e.g., an MC4R agonist described herein, e.g., SEQ ID NO: 140). In an embodiment, the subject experiences a reduction in weight between about 20% to about 23% relative to the weight of the control prior to administration of the MC4R agonist (e.g., an MC4R agonist described herein, e.g., SEQ ID NO: 140). In an embodiment, the subject experiences a reduction in weight between about 20% to about 22% relative to the weight of the control prior to administration of the MC4R agonist (e.g., an MC4R agonist described herein, e.g., SEQ ID NO: 140). In an embodiment, the subject experiences a reduction in weight between about 20% to about 21% relative to the weight of the control prior to administration of the MC4R agonist (e.g., an MC4R agonist described herein, e.g., SEQ ID NO: 140).

[0266] In an embodiment, the subject experiences a reduction in weight between about 30% to about 40% relative to the weight of the subject prior to administration of the MC4R agonist (e.g., an MC4R agonist described herein, e.g., SEQ ID NO: 140). In an embodiment, the subject experiences a reduction in weight between about 30% to about 35% relative to the weight of the subject prior to administration of the MC4R agonist (e.g., an MC4R agonist described herein, e.g., SEQ ID NO: 140).

[0267] In an embodiment, the subject experiences a reduction in weight between about 30% to about 40% relative to the weight of the subject prior to administration of the MC4R agonist (e.g., an MC4R agonist described herein, e.g., SEQ ID NO: 140). In an embodiment, the subject experiences a reduction in weight between about 30% to about 39%, 30% to about 38%, 30% to about 37%, 30% to about 36%, 30% to about 35%, 30% to about 34%, 30% to about 33%, 30% to about 32% or between about 30% to about 31% relative to the weight of the subject prior to administration of the MC4R agonist (e.g., an MC4R agonist described herein, e.g., SEQ ID NO: 140). In an embodiment, the subject experiences a reduction in weight between about 30% to about 39% relative to the weight of the subject prior to administration of the MC4R agonist (e.g., an agonist described herein, e.g., SEQ ID NO: 140). In an embodiment, the subject experiences a reduction in weight between about 30% to about 38% relative to the weight of the subject prior to administration of the MC4R agonist (e.g., an agonist described herein, e.g., SEQ ID NO: 140). In an embodiment, the subject experiences a reduction in weight between about 30% to about 37% relative to the weight of the subject prior to administration of the MC4R agonist (e.g., an agonist described herein, e.g., SEQ ID NO: 140). In an embodiment, the subject experiences a reduction in weight between about 30% to about 36% relative to the weight of the subject prior to administration of the MC4R agonist (e.g., an agonist described herein, e.g., SEQ ID NO: 140). In an embodiment, the subject experiences a reduction in weight between about 30% to about 35% relative to the weight of the subject prior to administration of the MC4R agonist (e.g., an agonist described herein, e.g., SEQ ID NO: 140). In an embodiment, the subject experiences a reduction in weight between about 30% to about 34% relative to the weight of the subject prior to administration of the MC4R agonist (e.g., an agonist described herein, e.g., SEQ ID NO: 140). In an embodiment, the subject experiences a reduction in weight between about 30% to about 33% relative to the weight of the subject prior to administration of the MC4R agonist (e.g., an agonist described herein, e.g., SEQ ID NO: 140). In an embodiment, the subject experiences a reduction in weight between about 30% to about 32% relative to the weight of the subject prior to administration of the MC4R agonist (e.g., an agonist described herein, e.g., SEQ ID NO: 140). In an embodiment, the subject experiences a reduction in weight between about 30% to about 31% relative to the weight of the subject prior to administration of the MC4R agonist (e.g., an agonist described herein, e.g., SEQ ID NO: 140).

[0268] In an embodiment, the subject experiences a reduction in weight of less than 40% relative to the weight of the subject prior to administration of the MC4R agonist (e.g., an MC4R agonist described herein, e.g., SEQ ID NO: 140). In an embodiment, the subject experiences a reduction in weight of less than 35%, 30%, 25%, 22.5%, 20%, 17.5%, 15%, 12.5%, 10%, 9%, 8%, 7%, 6%, 5%, 4%, 3%, 2%, 1% or less relative to the weight of the subject prior to administration of the MC4R agonist (e.g., an MC4R agonist described herein, e.g., SEQ ID NO: 140). In an embodiment, the subject experiences a reduction in weight of less than 35% relative to the weight of the subject prior to administration of the MC4R agonist (e.g., an MC4R agonist described herein, e.g., SEQ ID NO: 140). In an embodiment, the subject experiences a reduction in weight of less than 30% relative to the weight of the subject prior to administration of the MC4R agonist (e.g., an MC4R agonist described herein, e.g., SEQ ID NO: 140). In an embodiment, the subject experiences a reduction in weight of less than 25% relative to the weight of the subject prior to administration of the MC4R agonist (e.g., an MC4R agonist described herein, e.g., SEQ ID NO: 140). In an embodiment, the subject experiences a reduction in weight of less than 22.5% relative to the weight of the subject prior to administration of the MC4R agonist (e.g., an MC4R agonist described herein, e.g., SEQ ID NO: 140). In an embodiment, the subject experiences a reduction in weight of less than 20% relative to the weight of the subject prior to administration of the MC4R agonist (e.g., an MC4R agonist described herein, e.g., SEQ ID NO: 140). In an embodiment, the subject experiences a reduction in weight of less than 17.5% relative to the weight of the subject prior to administration of the MC4R agonist (e.g., an MC4R agonist described herein, e.g., SEQ ID NO: 140). In an embodiment, the subject experiences a reduction in weight of less than 15% relative to the weight of the subject prior to administration of the MC4R agonist (e.g., an MC4R agonist described herein, e.g., SEQ ID NO: 140). In an embodiment, the subject experiences a reduction in weight of less than 12.5% relative to the weight of the subject prior to administration of the MC4R agonist (e.g., an MC4R agonist described herein, e.g., SEQ ID NO: 140). In an embodiment, the subject experiences a reduction in weight of less than 10% relative to the weight of the subject prior to administration of the MC4R agonist (e.g., an MC4R agonist described herein, e.g., SEQ ID NO: 140). In an embodiment, the subject experiences a reduction in weight of less than 9% relative to the weight of the subject prior to administration of the MC4R agonist (e.g., an MC4R agonist described herein, e.g., SEQ ID NO: 140). In an embodiment, the subject experiences a reduction in weight of less than 8% relative to the weight of the subject prior to administration of the MC4R agonist (e.g., an MC4R agonist described herein, e.g., SEQ ID NO: 140). In an embodiment, the subject experiences a reduction in weight of less than 7% relative to the weight of the subject prior to administration of the MC4R agonist (e.g., an MC4R agonist described herein, e.g., SEQ ID NO: 140). In an embodiment, the subject experiences a reduction in weight of less than 6% relative to the weight of the subject prior to administration of the MC4R agonist (e.g., an MC4R agonist described herein, e.g., SEQ ID NO: 140). In an embodiment, the subject experiences a reduction in weight of less than 5% relative to the weight of the subject prior to administration of the MC4R agonist (e.g., an MC4R agonist described herein, e.g., SEQ ID NO: 140). In an embodiment, the subject experiences a reduction in weight of less than 4% relative to the weight of the subject prior to administration of the MC4R agonist (e.g., an MC4R agonist described herein, e.g., SEQ ID NO: 140). In an embodiment, the subject experiences a reduction in weight of less than 3% relative to the weight of the subject prior to administration of the MC4R agonist (e.g., an MC4R agonist described herein, e.g., SEQ ID NO: 140). In an embodiment, the subject experiences a reduction in weight of less than 2% relative to the weight of the subject prior to administration of the MC4R agonist (e.g., an MC4R agonist described herein, e.g., SEQ ID NO: 140). In an embodiment, the subject experiences a reduction in weight of less than 1% relative to the weight of the subject prior to administration of the MC4R agonist (e.g., an MC4R agonist described herein, e.g., SEQ ID NO: 140).

[0269] In embodiments, methods described herein result in a reduction in body mass index (BMI), measured in kg/m², in the subject compared to a control (e.g., BMI of the subject before treatment or a predetermined value, e.g., average BMI of an obese human population of like age and gender as the subject not subjected to therapeutic intervention, or the BMI of the subject at a previous measurement, e.g., at a previous visit.)

[0270] A subject may experience a reduction in BMI upon administration of the MC4R agonist (e.g., an MC4R agonist described herein, e.g., SEQ ID NO. 140). For example, the subject may experience a reduction of BMI greater 10% upon administration of the MC4R agonist (e.g., an MC4R agonist described herein, e.g., SEQ ID NO: 140), relative to the BMI of the subject prior to administration of the MC4R agonist (e.g., an MC4R agonist described herein, e.g., SEQ ID NO: 140). In an embodiment, the subject experiences a reduction in BMI of greater than 1.5%, 2%, 2.5%, 3%, 4%, 5% 6% 7%, 8% 9%, 10%, 12.5%, 15%, 17.5%, 20% or more, relative to the BMI of the subject prior to administration of the MC4R agonist (e.g., an MC4R agonist described herein, e.g., SEQ ID NO: 140). In an embodiment, the subject experiences a reduction in BMI of greater than 2% relative to the BMI of the subject prior to administration of the MC4R agonist (e.g., an MC4R agonist described herein, e.g., SEQ ID NO: 140). In an embodiment, the subject experiences a reduction in BMI of greater than 5% relative to the BMI of the subject prior to administration of the MC4R agonist (e.g., an MC4R agonist described herein, e.g., SEQ ID NO: 140). In an embodiment, the subject experiences a reduction in BMI of greater than 7.5% relative to the BMI of the subject prior to administration of the MC4R agonist (e.g., an MC4R agonist described herein, e.g., SEQ ID NO: 140). In an embodiment, the subject experiences a reduction in BMI of greater than 10% relative to the BMI of the subject prior to administration of the MC4R agonist (e.g., an MC4R agonist described herein, e.g., SEQ ID NO: 140). In an embodiment, the subject experiences a reduction in BMI of greater than 15% relative to the BMI of the subject prior to administration of the MC4R agonist (e.g., an MC4R agonist described herein, e.g., SEQ ID NO: 140). In an embodiment, the subject experiences a reduction in BMI of greater than 18% relative to the BMI of the subject prior to administration of the MC4R agonist (e.g., an MC4R agonist described herein, e.g., SEQ ID NO: 140). In an embodiment, the subject experiences a reduction in BMI of greater than 19% relative to the BMI of the subject prior to administration of the MC4R agonist (e.g., an MC4R agonist described herein, e.g., SEQ ID NO: 140). In an embodiment, the subject experiences a reduction in BMI of greater than 20% relative to the BMI of the subject prior to administration of the MC4R agonist (e.g., an MC4R agonist described herein, e.g., SEQ ID NO: 140).

[0271] In an embodiment, the subject experiences a reduction in BMI between about 1% to about 20% relative to the BMI of the subject prior to administration of the MC4R agonist (e.g., an MC4R agonist described herein, e.g., SEQ ID NO: 140). In an embodiment, the subject experiences a reduction in BMI between about 1% to about 19%, 1% to about 18%, 1% to about 17%, 1% to about 16%, 1% to about 15%, about 1% to about 12.5%, about 1% to about 10%, about 1% to about 7.5%, about 1% to about 5% relative to the BMI of the subject prior to administration of the MC4R agonist (e.g., an MC4R agonist described herein, e.g., SEQ ID NO: 140). In an embodiment, the subject experiences a reduction in BMI between about 1% to about 15% relative to the BMI of the subject prior to administration of the MC4R agonist (e.g., an MC4R agonist described herein, e.g., SEQ ID NO: 140). In an embodiment, the subject experiences a reduction in BMI between about 1% to about 10% relative to the BMI of the subject prior to administration of the MC4R agonist (e.g., an MC4R agonist described herein, e.g., SEQ ID NO: 140).

[0272] In an embodiment, the subject experiences a reduction in BMI between about 5% to about 20% relative to the BMI of the subject prior to administration of the MC4R agonist (e.g., an MC4R agonist described herein, e.g., SEQ ID NO: 140). In an embodiment, the subject experiences a reduction in BMI between about 5% to about 19%, 5% to about 18%, 5% to about 17%, 5% to about 16%, 5% to about 15%, about 5% to about 12.5%, about 5% to about 10%, about 5% to about 7.5% relative to the BMI of the subject prior to administration of the MC4R agonist (e.g., an MC4R agonist described herein, e.g., SEQ ID NO: 140). In an embodiment, the subject experiences a reduction in BMI between about 5% to about 15% relative to the BMI of the subject prior to administration of the MC4R agonist. In an embodiment, the subject experiences a reduction in BMI between about 5% to about 10% relative to the BMI of the subject prior to administration of the MC4R agonist (e.g., an MC4R agonist described herein, e.g., SEQ ID NO: 140).

[0273] In an embodiment, the subject experiences a reduction in BMI between about 10% to about 20% relative to the BMI of the subject prior to administration of the MC4R agonist (e.g., an MC4R agonist described herein, e.g., SEQ ID NO: 140). In an embodiment, the subject experiences a reduction in BMI between about 10% to about 19%, 10% to about 18%, 10% to about 17%, 10% to about 16%, 10% to about 14%, 10% to about 13%, 10% to about 12%, or 10% to 11% relative to the BMI of the subject prior to administration of the MC4R agonist (e.g., an MC4R agonist described herein, e.g., SEQ ID NO: 140). In an embodiment, the subject experiences a reduction in BMI between about 10% to about 19% relative to the BMI of the subject prior to administration of the MC4R agonist (e.g., an MC4R agonist described herein, e.g., SEQ ID NO: 140). In an embodiment, the subject experiences a reduction in BMI between about 10% to about 18% relative to the BMI of the subject prior to administration of the MC4R agonist (e.g., an MC4R agonist described herein, e.g., SEQ ID NO: 140). In an embodiment, the subject experiences a reduction in BMI between about 10% to about 17% relative to the BMI of the subject prior to administration of the MC4R agonist (e.g., an MC4R agonist described herein, e.g., SEQ ID NO: 140). In an embodiment, the subject experiences a reduction in BMI between about 10% to about 16% relative to the BMI of the subject prior to administration of the MC4R agonist (e.g., an MC4R agonist described herein, e.g., SEQ ID NO: 140). In an embodiment, the subject experiences a reduction in BMI between about 10% to about 15% relative to the BMI of the subject prior to administration of the MC4R agonist (e.g., an MC4R agonist described herein, e.g., SEQ ID NO: 140). In an embodiment, the subject experiences a reduction in BMI between about 10% to about 14% relative to the BMI of the subject prior to administration of the MC4R agonist (e.g., an MC4R agonist described herein, e.g., SEQ ID NO: 140). In an embodiment, the subject experiences a reduction in BMI between about 10% to about 13% relative to the BMI of the subject prior to administration of the MC4R agonist (e.g., an MC4R agonist described herein, e.g., SEQ ID NO: 140). In an embodiment, the subject experiences a reduction in BMI between about 10% to about 12% relative to the BMI of the subject prior to administration of the MC4R agonist (e.g., an MC4R agonist described herein, e.g., SEQ ID NO: 140). In an embodiment, the subject experiences a reduction in BMI between about 10% to about 11% relative to the BMI of the subject prior to administration of the MC4R agonist (e.g., an MC4R agonist described herein, e.g., SEQ ID NO: 140).

[0274] A subject may experience a reduction in BMI upon administration of the MC4R agonist (e.g., an MC4R agonist described herein, e.g., SEQ ID NO: 140). For example, the subject may experience a reduction of BMI of less than 20% upon administration of the MC4R agonist relative to the BMI of the subject prior to administration of the MC4R agonist. In an embodiment, the subject experiences a reduction in BMI of less than 17.5%, 15%, 12.5%, 10%, 9%, 8%, 7%, 6%, 5%, 4%, 3%, 2.5%, 2%, 1.5% or less, relative to the BMI of the subject prior administration of the MC4R agonist (e.g., an MC4R agonist described herein, e.g., SEQ ID NO: 140). In an embodiment, the subject experiences a reduction in BMI of less than 17.5% relative to the BMI of the subject prior to administration of the MC4R agonist (e.g., a MC4R agonist described herein, e.g., SEQ ID NO: 140). In an embodiment, the subject experiences a reduction in BMI of less than 15% relative to the BMI of the subject prior to administration of the MC4R agonist (e.g., a MC4R agonist described herein, e.g., SEQ ID NO: 140). In an embodiment, the subject experiences a reduction in BMI of less than 12.5% relative to the BMI of the subject prior to administration of the MC4R agonist (e.g., a MC4R agonist described herein, e.g., SEQ ID NO: 140). In an embodiment, the subject experiences a reduction in BMI of less than 10% relative to the BMI of the subject prior to administration of the MC4R agonist (e.g., a MC4R agonist described herein, e.g., SEQ ID NO: 140). In an embodiment, the subject experiences a reduction in BMI of less than 9% relative to the BMI of the subject prior to administration of the MC4R agonist (e.g., a MC4R agonist described herein, e.g., SEQ ID NO: 140). In an embodiment, the subject experiences a reduction in BMI of less than 8% relative to the BMI of the subject prior to administration of the MC4R agonist (e.g., a MC4R agonist described herein, e.g., SEQ ID NO: 140). In an embodiment, the subject experiences a reduction in BMI of less than 7% relative to the BMI of the subject prior to administration of the MC4R agonist (e.g., a MC4R agonist described herein, e.g., SEQ ID NO: 140). In an embodiment, the subject experiences a reduction in BMI of less than 6% relative to the BMI of the subject prior to administration of the MC4R agonist (e.g., a MC4R agonist described herein, e.g., SEQ ID NO: 140). In an embodiment, the subject experiences a reduction in BMI of less than 5% relative to the BMI of the subject prior to administration of the MC4R agonist (e.g., a MC4R agonist described herein, e.g., SEQ ID NO: 140). In an embodiment, the subject experiences a reduction in BMI of less than 4% relative to the BMI of the subject prior to administration of the MC4R agonist (e.g., a MC4R agonist described herein, e.g., SEQ ID NO: 140). In an embodiment, the subject experiences a reduction in BMI of less than 3% relative to the BMI of the subject prior to administration of the MC4R agonist (e.g., a MC4R agonist described herein, e.g., SEQ ID NO: 140). In an embodiment, the subject experiences a reduction in BMI of less than 2% relative to the BMI of the subject prior to administration of the MC4R agonist (e.g., a MC4R agonist described herein, e.g., SEQ ID NO: 140). In an embodiment, the subject experiences a reduction in BMI of less than 1% relative to the BMI of the subject prior to administration of the MC4R agonist (e.g., a MC4R agonist described herein, e.g., SEQ ID NO: 140).

[0275] In embodiments, methods described herein result in a reduction of BMI Z-Score in the subject compared to the BMI Z-Score of a control (e.g., the BMI Z-Score of the subject before treatment or a predetermined value, e.g., average BMI Z-Score of an obese human population of like age and/or gender as the subject not subjected to therapeutic intervention, or the BMI Z-Score of the subject at a previous measurement, e.g., a previous measurement), wherein the Z-Score is computed from the standard deviation from a reference population of similar age and gender (e.g., the Z-Score of a reference population with a mean BMI of 25 and a standard deviation of 1.5).

[0276] A subject may experience a reduction in BMI Z-Score upon administration of the MC4R agonist (e.g., an MC4R agonist described herein, e.g., SEQ ID NO: 140). For example, the subject may experience a reduction in BMI Z-Score of 0.1 upon administration of the MC4R agonist (e.g., an MC4R agonist described herein, e.g., SEQ ID NO: 140), relative to the BMI Z-Score of the subject prior to administration of the MC4R agonist. In an embodiment, the subject experiences a reduction of BMI Z-Score of greater than 0.2, 0.3, 0.4, 0.5, 0.6, 0.7, 0.8, 0.9, 1, 1.1, 1.2, 1.3, 1.4, 1.5, 1.6, 1.7, 1.8, 1.9, 2, 2.25, 2.5, 2.75, 3, or more, relative to the BMI Z-Score of the subject prior to administration of the MC4R agonist. In an embodiment, the subject experiences a reduction in BMI Z-Score greater than 0.2, relative to the BMI Z-Score of the subject prior to administration of the MC4R agonist (e.g., an MC4R agonist described here, e.g., SEQ ID NO: 140). In an embodiment, the subject experiences a reduction in BMI Z-Score greater than 0.3, relative to the BMI Z-Score of the subject prior to administration of the MC4R agonist (e.g., an MC4R agonist described here, e.g., SEQ ID NO: 140). In an embodiment, the subject experiences a reduction in BMI Z-Score greater than 0.4, relative to the BMI Z-Score of the subject prior to administration of the MC4R agonist (e.g., an MC4R agonist described here, e.g., SEQ ID NO: 140). In an embodiment, the subject experiences a reduction in BMI Z-Score greater than 0.5, relative to the BMI Z-Score of the subject prior to administration of the MC4R agonist (e.g., an MC4R agonist described here, e.g., SEQ ID NO: 140). In an embodiment, the subject experiences a reduction in BMI Z-Score greater than 0.6, relative to the BMI Z-Score of the subject prior to administration of the MC4R agonist (e.g., an MC4R agonist described here, e.g., SEQ ID NO: 140). In an embodiment, the subject experiences a reduction in BMI Z-Score greater than 0.7, relative to the BMI Z-Score of the subject prior to administration of the MC4R agonist (e.g., an MC4R agonist described here, e.g., SEQ ID NO: 140). In an embodiment, the subject experiences a reduction in BMI Z-Score greater than 0.8, relative to the BMI Z-Score of the subject prior to administration of the MC4R agonist (e.g., an MC4R agonist described here, e.g., SEQ ID NO: 140). In an embodiment, the subject experiences a reduction in BMI Z-Score greater than 0.9, relative to the BMI Z-Score of the subject prior to administration of the MC4R agonist (e.g., an MC4R agonist described here, e.g., SEQ ID NO: 140). In an embodiment, the subject experiences a reduction in BMI Z-Score greater than 1, relative to the BMI Z-Score of the subject prior to administration of the MC4R agonist (e.g., an MC4R agonist described here, e.g., SEQ ID NO: 140). In an embodiment, the subject experiences a reduction in BMI Z-Score greater than 1.1, relative to the BMI Z-Score of the subject prior to administration of the MC4R agonist (e.g., an MC4R agonist described here, e.g., SEQ ID NO: 140). In an embodiment, the subject experiences a reduction in BMI Z-Score greater than 1.2, relative to the BMI Z-Score of the subject prior to administration of the MC4R agonist (e.g., an MC4R agonist described here, e.g., SEQ ID NO: 140). In an embodiment, the subject experiences a reduction in BMI Z-Score greater than 1.3, relative to the BMI Z-Score of the subject prior to administration of the MC4R agonist (e.g., an MC4R agonist described here, e.g., SEQ ID NO: 140). In an embodiment, the subject experiences a reduction in BMI Z-Score greater than 1.4, relative to the BMI Z-Score of the subject prior to administration of the MC4R agonist (e.g., an MC4R agonist described here, e.g., SEQ ID NO: 140). In an embodiment, the subject experiences a reduction in BMI Z-Score greater than 1.5, relative to the BMI Z-Score of the subject prior to administration of the MC4R agonist (e.g., an MC4R agonist described here, e.g., SEQ ID NO: 140). In an embodiment, the subject experiences a reduction in BMI Z-Score greater than 1.6, relative to the BMI Z-Score of the subject prior to administration of the MC4R agonist (e.g., an MC4R agonist described here, e.g., SEQ ID NO: 140). In an embodiment, the subject experiences a reduction in BMI Z-Score greater than 1.7, relative to the BMI Z-Score of the subject prior to administration of the MC4R agonist (e.g., an MC4R agonist described here, e.g., SEQ ID NO: 140). In an embodiment, the subject experiences a reduction in BMI Z-Score greater than 1.8, relative to the BMI Z-Score of the subject prior to administration of the MC4R agonist (e.g., an MC4R agonist described here, e.g., SEQ ID NO: 140). In an embodiment, the subject experiences a reduction in BMI Z-Score greater than 1.9, relative to the BMI Z-Score of the subject prior to administration of the MC4R agonist (e.g., an MC4R agonist described here, e.g., SEQ ID NO: 140). In an embodiment, the subject experiences a reduction in BMI Z-Score greater than 2, relative to the BMI Z-Score of the subject prior to administration of the MC4R agonist (e.g., an MC4R agonist described here, e.g., SEQ ID NO: 140). In an embodiment, the subject experiences a reduction in BMI Z-Score greater than 2.25, relative to the BMI Z-Score of the subject prior to administration of the MC4R agonist (e.g., an MC4R agonist described here, e.g., SEQ ID NO: 140). In an embodiment, the subject experiences a reduction in BMI Z-Score greater than 2.5, relative to the BMI Z-Score of the subject prior to administration of the MC4R agonist (e.g., an MC4R agonist described here, e.g., SEQ ID NO: 140). In an embodiment, the subject experiences a reduction in BMI Z-Score greater than 2.75, relative to the BMI Z-Score of the subject prior to administration of the MC4R agonist (e.g., an MC4R agonist described here, e.g., SEQ ID NO: 140). In an embodiment, the subject experiences a reduction in BMI Z-Score greater than 3, relative to the BMI Z-Score of the subject prior to administration of the MC4R agonist (e.g., an MC4R agonist described here, e.g., SEQ ID NO: 140).

[0277] In an embodiment, the subject experiences a reduction in BMI Z-Score between about 0.1 to about 3 relative to the BMI Z-Score of the subject prior to administration of the MC4R agonist (e.g., an MC4R agonist described herein, e.g., SEQ ID NO: 140). In an embodiment, the subject experiences a reduction in BMI Z-Score between about 0.1 to about 2.75, 0.1 to about 2.5, 0.1 to about 02.25, 0.1 to about 2, 0.1 to about 1.9, 0.1 to about 1.8, 0.1 to about 1.7, 0.1 to about 1.6, 0.1 to about 1.5, 0.1 to about 1.4, 0.1 to about 1.3, 0.1 to about 1.2, 0.1 to about 1.1, 0.1 to about 1, 0.1 to about 0.9, 0.1 to about 0.8, 0.1 to about 0.7, 0.1 to about 0.6, 0.1 to about 0.5, 0.1 to about 0.4, 0.1 to about 0.3, or between 0.1 to about 0.2 relative the BMI Z-Score of the subject prior to administration of the MC4R agonist (e.g., an MC4R agonist described herein, e.g., SEQ ID NO: 140). In an embodiment, the subject experiences a reduction in BMI Z-Score between about 0.1 to about 2.75 relative to the BMI Z-Score of the subject prior to administration of the MC4R agonist (e.g., an MC4R agonist described herein, e.g., SEQ ID NO: 140). In an embodiment, the subject experiences a reduction in BMI Z-Score between about 0.1 to about 2.5 relative to the BMI Z-Score of the subject prior to administration of the MC4R agonist (e.g., an MC4R agonist described herein, e.g., SEQ ID NO: 140). In an embodiment, the subject experiences a reduction in BMI Z-Score between about 0.1 to about 2.25 relative to the BMI Z-Score of the subject prior to administration of the MC4R agonist (e.g., an MC4R agonist described herein, e.g., SEQ ID NO: 140). In an embodiment, the subject experiences a reduction in BMI Z-Score between about 0.1 to about 2 relative to the BMI Z-Score of the subject prior to administration of the MC4R agonist (e.g., an MC4R agonist described herein, e.g., SEQ ID NO: 140). In an embodiment, the subject experiences a reduction in BMI Z-Score between about 0.1 to about 1.9 relative to the BMI Z-Score of the subject prior to administration of the MC4R agonist (e.g., an MC4R agonist described herein, e.g., SEQ ID NO: 140). In an embodiment, the subject experiences a reduction in BMI Z-Score between about 0.1 to about 1.8 relative to the BMI Z-Score of the subject prior to administration of the MC4R agonist (e.g., an MC4R agonist described herein, e.g., SEQ ID NO: 140). In an embodiment, the subject experiences a reduction in BMI Z-Score between about 0.1 to about 1.7 relative to the BMI Z-Score of the subject prior to administration of the MC4R agonist (e.g., an MC4R agonist described herein, e.g., SEQ ID NO: 140). In an embodiment, the subject experiences a reduction in BMI Z-Score between about 0.1 to about 1.6 relative to the BMI Z-Score of the subject prior to administration of the MC4R agonist (e.g., an MC4R agonist described herein, e.g., SEQ ID NO: 140). In an embodiment, the subject experiences a reduction in BMI Z-Score between about 0.1 to about 1.5 relative to the BMI Z-Score of the subject prior to administration of the MC4R agonist (e.g., an MC4R agonist described herein, e.g., SEQ ID NO: 140). In an embodiment, the subject experiences a reduction in BMI Z-Score between about 0.1 to about 1.4 relative to the BMI Z-Score of the subject prior to administration of the MC4R agonist (e.g., an MC4R agonist described herein, e.g., SEQ ID NO: 140). In an embodiment, the subject experiences a reduction in BMI Z-Score between about 0.1 to about 1.3 relative to the BMI Z-Score of the subject prior to administration of the MC4R agonist (e.g., an MC4R agonist described herein, e.g., SEQ ID NO: 140). In an embodiment, the subject experiences a reduction in BMI Z-Score between about 0.1 to about 1.2 relative to the BMI Z-Score of the subject prior to administration of the MC4R agonist (e.g., an MC4R agonist described herein, e.g., SEQ ID NO: 140). In an embodiment, the subject experiences a reduction in BMI Z-Score between about 0.1 to about 1.1 relative to the BMI Z-Score of the subject prior to administration of the MC4R agonist (e.g., an MC4R agonist described herein, e.g., SEQ ID NO: 140). In an embodiment, the subject experiences a reduction in BMI Z-Score between about 0.1 to about 1 relative to the BMI Z-Score of the subject prior to administration of the MC4R agonist (e.g., an MC4R agonist described herein, e.g., SEQ ID NO: 140). In an embodiment, the subject experiences a reduction in BMI Z-Score between about 0.1 to about 0.9 relative to the BMI Z-Score of the subject prior to administration of the MC4R agonist (e.g., an MC4R agonist described herein, e.g., SEQ ID NO: 140). In an embodiment, the subject experiences a reduction in BMI Z-Score between about 0.1 to about 0.8 relative to the BMI Z-Score of the subject prior to administration of the MC4R agonist (e.g., an MC4R agonist described herein, e.g., SEQ ID NO: 140). In an embodiment, the subject experiences a reduction in BMI Z-Score between about 0.1 to about 0.7 relative to the BMI Z-Score of the subject prior to administration of the MC4R agonist (e.g., an MC4R agonist described herein, e.g., SEQ ID NO: 140). In an embodiment, the subject experiences a reduction in BMI Z-Score between about 0.1 to about 0.6 relative to the BMI Z-Score of the subject prior to administration of the MC4R agonist (e.g., an MC4R agonist described herein, e.g., SEQ ID NO: 140). In an embodiment, the subject experiences a reduction in BMI Z-Score between about 0.1 to about 0.5 relative to the BMI Z-Score of the subject prior to administration of the MC4R agonist (e.g., an MC4R agonist described herein, e.g., SEQ ID NO: 140). In an embodiment, the subject experiences a reduction in BMI Z-Score between about 0.1 to about 0.4 relative to the BMI Z-Score of the subject prior to administration of the MC4R agonist (e.g., an MC4R agonist described herein, e.g., SEQ ID NO: 140). In an embodiment, the subject experiences a reduction in BMI Z-Score between about 0.1 to about 0.3 relative to the BMI Z-Score of the subject prior to administration of the MC4R agonist (e.g., an MC4R agonist described herein, e.g., SEQ ID NO: 140). In an embodiment, the subject experiences a reduction in BMI Z-Score between about 0.1 to about 0.2 relative to the BMI Z-Score of the subject prior to administration of the MC4R agonist (e.g., an MC4R agonist described herein, e.g., SEQ ID NO: 140).

[0278] In an embodiment, the subject experiences a reduction in BMI Z-Score between about 1 to 3 relative the BMI Z-Score of the subject prior to administration of the MC4R agonist (e.g., an MC4R agonist described herein, e.g., SEQ ID NO: 140). In an embodiment, the subject experiences a reduction in BMI Z-Score of between about 1 to about 2.75, 1 to about 2.5, 1 to about 2.25, 1 to about 2, 1 to about 1.9, 1 to about 1.8, 1 to about 1.7, 1 to about 1.6, 1.5, 1 to about 1.4, 1 to about 1.3, 1 to about 1.2, or between 1 to about 1.1 relative to the BMI Z-Score of the subject prior to the administration of the MC4R agonist (e.g., an MC4R agonist described herein, e.g., SEQ ID NO: 140). In an embodiment, the subject experiences a reduction in BMI Z-Score between about 1 to about 2.75 relative to the BMI Z-Score of the subject prior to administration of the MC4R agonist (e.g., an MC4R agonist described herein, e.g., SEQ ID NO: 140). In an embodiment, the subject experiences a reduction in BMI Z-Score between about 1 to about 2.5 relative to the BMI Z-Score of the subject prior to administration of the MC4R agonist (e.g., an MC4R agonist described herein, e.g., SEQ ID NO: 140). In an embodiment, the subject experiences a reduction in BMI Z-Score between about 1 to about 2.25 relative to the BMI Z-Score of the subject prior to administration of the MC4R agonist (e.g., an MC4R agonist described herein, e.g., SEQ ID NO: 140). In an embodiment, the subject experiences a reduction in BMI Z-Score between about 1 to about 2 relative to the BMI Z-Score of the subject prior to administration of the MC4R agonist (e.g., an MC4R agonist described herein, e.g., SEQ ID NO: 140). In an embodiment, the subject experiences a reduction in BMI Z-Score between about 1 to about 1.9 relative to the BMI Z-Score of the subject prior to administration of the MC4R agonist (e.g., an MC4R agonist described herein, e.g., SEQ ID NO: 140). In an embodiment, the subject experiences a reduction in BMI Z-Score between about 1 to about 1.8 relative to the BMI Z-Score of the subject prior to administration of the MC4R agonist (e.g., an MC4R agonist described herein, e.g., SEQ ID NO: 140). In an embodiment, the subject experiences a reduction in BMI Z-Score between about 1 to about 1.7 relative to the BMI Z-Score of the subject prior to administration of the MC4R agonist (e.g., an MC4R agonist described herein, e.g., SEQ ID NO: 140). In an embodiment, the subject experiences a reduction in BMI Z-Score between about 1 to about 1.6 relative to the BMI Z-Score of the subject prior to administration of the MC4R agonist (e.g., an MC4R agonist described herein, e.g., SEQ ID NO: 140). In an embodiment, the subject experiences a reduction in BMI Z-Score between about 1 to about 1.5 relative to the BMI Z-Score of the subject prior to administration of the MC4R agonist (e.g., an MC4R agonist described herein, e.g., SEQ ID NO: 140). In an embodiment, the subject experiences a reduction in BMI Z-Score between about 1 to about 1.4 relative to the BMI Z-Score of the subject prior to administration of the MC4R agonist (e.g., an MC4R agonist described herein, e.g., SEQ ID NO: 140). In an embodiment, the subject experiences a reduction in BMI Z-Score between about 1 to about 1.3 relative to the BMI Z-Score of the subject prior to administration of the MC4R agonist (e.g., an MC4R agonist described herein, e.g., SEQ ID NO: 140). In an embodiment, the subject experiences a reduction in BMI Z-Score between about 1 to about 1.2 relative to the BMI Z-Score of the subject prior to administration of the MC4R agonist (e.g., an MC4R agonist described herein, e.g., SEQ ID NO: 140). In an embodiment, the subject experiences a reduction in BMI Z-Score between about 1 to about 1.1 relative to the BMI Z-Score of the subject prior to administration of the MC4R agonist (e.g., an MC4R agonist described herein, e.g., SEQ ID NO: 140).

[0279] In an embodiment, the subject experiences a reduction in BMI Z-Score between about 2 to about 3 relative to the BMI Z-Score of the subject prior to administration of the MC4R agonist (e.g., an MC4R agonist described herein, e.g., SEQ ID NO: 140). In an embodiment, the subject experiences a reduction in BMI Z-Score between about 2 to about 2.75, 2 to about 2.5, or between about 2 to about 2.25 relative to the BMI Z-Score of the subject prior to administration of the MC4R agonist (e.g., an MC4R agonist described herein, e.g., SEQ ID NO: 140). In an embodiment, the subject experiences a reduction in BMI Z-Score between about 2 to about 2.75 relative to the BMI Z-Score of the subject prior to administration of the MC4R agonist (e.g., an MC4R agonist described herein, e.g., SEQ ID NO: 140). In an embodiment, the subject experiences a reduction in BMI Z-Score between about 2 to about 2.5 relative to the BMI Z-Score of the subject prior to administration of the MC4R agonist (e.g., an MC4R agonist described herein, e.g., SEQ ID NO: 140). In an embodiment, the subject experiences a reduction in BMI Z-Score between about 2 to about 2.25 relative to the BMI Z-Score of the subject prior to administration of the MC4R agonist (e.g., an MC4R agonist described herein, e.g., SEQ ID NO: 140).

[0280] In an embodiment, the subject experiences a reduction in BMI Z-Score between about 2 to about 3 relative to the BMI Z-Score of the subject prior to administration of the MC4R agonist (e.g., an MC4R agonist described herein, e.g., SEQ ID NO: 140). In an embodiment, the subject experiences a reduction in BMI Z-Score between about 2 to about 2.9, 2 to about 2.8, 2 to about 2.7, 2 to about 2.6, 2 to about 2.5, 2 to about 2.4, 2 to about 2.3, 2 to about 2.2 or between 2 to about 2.1 relative the BMI Z-Score of the subject prior to administration of the MC4R agonist (e.g., an MC4R agonist described herein, e.g., SEQ ID NO: 140). In an embodiment, the subject experiences a reduction in BMI Z-Score between about 2 to about 2.9 relative to the BMI Z-Score of the subject prior to administration of the MC4R agonist (e.g., an MC4R agonist described herein, e.g., SEQ ID NO: 140). In an embodiment, the subject experiences a reduction in BMI Z-Score between about 2 to about 2.8 relative to the BMI Z-Score of the subject prior to administration of the MC4R agonist (e.g., an MC4R agonist described herein, e.g., SEQ ID NO: 140). In an embodiment, the subject experiences a reduction in BMI Z-Score between about 2 to about 2.7 relative to the BMI Z-Score of the subject prior to administration of the MC4R agonist (e.g., an MC4R agonist described herein, e.g., SEQ ID NO: 140). In an embodiment, the subject experiences a reduction in BMI Z-Score between about 2 to about 2.6 relative to the BMI Z-Score of the subject prior to administration of the MC4R agonist (e.g., an MC4R agonist described herein, e.g., SEQ ID NO: 140). In an embodiment, the subject experiences a reduction in BMI Z-Score between about 2 to about 2.5 relative to the BMI Z-Score of the subject prior to administration of the MC4R agonist (e.g., an MC4R agonist described herein, e.g., SEQ ID NO: 140). In an embodiment, the subject experiences a reduction in BMI Z-Score between about 2 to about 2.4 relative to the BMI Z-Score of the subject prior to administration of the MC4R agonist (e.g., an MC4R agonist described herein, e.g., SEQ ID NO: 140). In an embodiment, the subject experiences a reduction in BMI Z-Score between about 2 to about 2.3 relative to the BMI Z-Score of the subject prior to administration of the MC4R agonist (e.g., an MC4R agonist described herein, e.g., SEQ ID NO: 140). In an embodiment, the subject experiences a reduction in BMI Z-Score between about 2 to about 2.2 relative to the BMI Z-Score of the subject prior to administration of the MC4R agonist (e.g., an MC4R agonist described herein, e.g., SEQ ID NO: 140). In an embodiment, the subject experiences a reduction in BMI Z-Score between about 2 to about 2.1 relative to the BMI Z-Score of the subject prior to administration of the MC4R agonist (e.g., an MC4R agonist described herein, e.g., SEQ ID NO: 140).

[0281] A subject may experience a reduction in BMI Z-Score upon administration of the MC4R agonist (e.g., an MC4R agonist described herein, e.g., SEQ ID NO: 140). For example, the subject may experience a reduction in BMI Z-Score of less than 3 upon administration of the MC4R agonist (e.g., an MC4R agonist described herein, e.g., SEQ ID NO: 140). In an embodiment, the subject experiences a reduction in BMI Z-Score of less than 2.9, 2.75, 2.5, 2.25, 2, 1.9, 1.8, 1.7, 1.6, 1.5, 1.4, 1.3, 1.2, 1.1, 1, 0.9, 0.7, 0.6, 0.5, 0.4, 0.3, 0.2 or less relative to the BMI Z-Score of the subject prior to administration of the MC4R agonist (e.g., an MC4R agonist described herein, e.g., SEQ ID NO: 140). In an embodiment, the subject experiences a reduction in BMI Z-Score of less than 2.9 relative to the BMI Z-Score of the of the subject prior to administration of the MC4R agonist (e.g., an MC4R agonist described herein, e.g., SEQ ID NO: 140). In an embodiment, the subject experiences a reduction in BMI Z-Score of less than 2.75 relative to the BMI Z-Score of the of the subject prior to administration of the MC4R agonist (e.g., an MC4R agonist described herein, e.g., SEQ ID NO: 140). In an embodiment, the subject experiences a reduction in BMI Z-Score of less than 2.25 relative to the BMI Z-Score of the of the subject prior to administration of the MC4R agonist (e.g., an MC4R agonist described herein, e.g., SEQ ID NO: 140). In an embodiment, the subject experiences a reduction in BMI Z-Score of less than 2 relative to the BMI Z-Score of the of the subject prior to administration of the MC4R agonist (e.g., an MC4R agonist described herein, e.g., SEQ ID NO: 140). In an embodiment, the subject experiences a reduction in BMI Z-Score of less than 1.9 relative to the BMI Z-Score of the of the subject prior to administration of the MC4R agonist (e.g., an MC4R agonist described herein, e.g., SEQ ID NO: 140). In an embodiment, the subject experiences a reduction in BMI Z-Score of less than 1.8 relative to the BMI Z-Score of the of the subject prior to administration of the MC4R agonist (e.g., an MC4R agonist described herein, e.g., SEQ ID NO: 140). In an embodiment, the subject experiences a reduction in BMI Z-Score of less than 1.7 relative to the BMI Z-Score of the of the subject prior to administration of the MC4R agonist (e.g., an MC4R agonist described herein, e.g., SEQ ID NO: 140). In an embodiment, the subject experiences a reduction in BMI Z-Score of less than 1.6 relative to the BMI Z-Score of the of the subject prior to administration of the MC4R agonist (e.g., an MC4R agonist described herein, e.g., SEQ ID NO: 140). In an embodiment, the subject experiences a reduction in BMI Z-Score of less than 1.5 relative to the BMI Z-Score of the of the subject prior to administration of the MC4R agonist (e.g., an MC4R agonist described herein, e.g., SEQ ID NO: 140). In an embodiment, the subject experiences a reduction in BMI Z-Score of less than 1.4 relative to the BMI Z-Score of the of the subject prior to administration of the MC4R agonist (e.g., an MC4R agonist described herein, e.g., SEQ ID NO: 140). In an embodiment, the subject experiences a reduction in BMI Z-Score of less than 1.3 relative to the BMI Z-Score of the of the subject prior to administration of the MC4R agonist (e.g., an MC4R agonist described herein, e.g., SEQ ID NO: 140). In an embodiment, the subject experiences a reduction in BMI Z-Score of less than 1.2 relative to the BMI Z-Score of the of the subject prior to administration of the MC4R agonist (e.g., an MC4R agonist described herein, e.g., SEQ ID NO: 140). In an embodiment, the subject experiences a reduction in BMI Z-Score of less than 1.1 relative to the BMI Z-Score of the of the subject prior to administration of the MC4R agonist (e.g., an MC4R agonist described herein, e.g., SEQ ID NO: 140). In an embodiment, the subject experiences a reduction in BMI Z-Score of less than 1 relative to the BMI Z-Score of the of the subject prior to administration of the MC4R agonist (e.g., an MC4R agonist described herein, e.g., SEQ ID NO: 140). In an embodiment, the subject experiences a reduction in BMI Z-Score of less than 0.9 relative to the BMI Z-Score of the of the subject prior to administration of the MC4R agonist (e.g., an MC4R agonist described herein, e.g., SEQ ID NO: 140). In an embodiment, the subject experiences a reduction in BMI Z-Score of less than 0.8 relative to the BMI Z-Score of the of the subject prior to administration of the MC4R agonist (e.g., an MC4R agonist described herein, e.g., SEQ ID NO: 140). In an embodiment, the subject experiences a reduction in BMI Z-Score of less than 0.7 relative to the BMI Z-Score of the of the subject prior to administration of the MC4R agonist (e.g., an MC4R agonist described herein, e.g., SEQ ID NO: 140). In an embodiment, the subject experiences a reduction in BMI Z-Score of less than 0.6 relative to the BMI Z-Score of the of the subject prior to administration of the MC4R agonist (e.g., an MC4R agonist described herein, e.g., SEQ ID NO: 140). In an embodiment, the subject experiences a reduction in BMI Z-Score of less than 0.5 relative to the BMI Z-Score of the of the subject prior to administration of the MC4R agonist (e.g., an MC4R agonist described herein, e.g., SEQ ID NO: 140). In an embodiment, the subject experiences a reduction in BMI Z-Score of less than 0.4 relative to the BMI Z-Score of the of the subject prior to administration of the MC4R agonist (e.g., an MC4R agonist described herein, e.g., SEQ ID NO: 140). In an embodiment, the subject experiences a reduction in BMI Z-Score of less than 0.3 relative to the BMI Z-Score of the of the subject prior to administration of the MC4R agonist (e.g., an MC4R agonist described herein, e.g., SEQ ID NO: 140). In an embodiment, the subject experiences a reduction in BMI Z-Score of less than 0.2 relative to the BMI Z-Score of the of the subject prior to administration of the MC4R agonist (e.g., an MC4R agonist described herein, e.g., SEQ ID NO: 140).

[0282] In embodiments, the hunger level is characterized by a weekly average of the daily most hunger score, wherein the weekly average of the daily most hunger score in a subject is compared to a control (e.g., the weekly average of the daily most hunger score in a subject before treatment or a predetermined value, e.g., the mean of the weekly average of the daily most hunger score of an obese human population of like age and gender as the subject not subjected to therapeutic intervention, or the weekly average of the daily most hunger score of the subject at a previous measurement, e.g., a previous visit).

[0283] A subject may experience a reduction in the weekly average of the daily most hunger score upon administration of the MC4R agonist (e.g., an MC4R agonist described herein, e.g., SEQ ID NO: 140). For example, the subject may experience a reduction in the weekly average of the daily most hunger score greater than 0.1 upon administration of the MC4R agonist relative to the weekly average of the daily most hunger score of the subject prior to administration of the MC4R agonist (e.g., an MC4R agonist described herein, e.g., SEQ ID NO: 140). In an embodiment, a subject experiences a reduction in the weekly average of the daily most hunger score greater than 0.2, 0.3, 0.4, 0.5, 0.6, 0.7, 0.8, 0.9, 1, 1.2, 1.4, 1.6, 1.8, 2, 2.5, 3, 3.5, 4, 4.5, 5, 5.5, 6, 6.5, 7 or greater relative to the weekly average of the daily most hunger score of the subject prior to administration of the MC4R agonist (e.g., an MC4R agonist described herein, e.g., SEQ ID NO: 140). In an embodiment, the subject experiences a reduction in the weekly average of the daily most hunger score greater than 0.2 relative to the weekly average of the daily most hunger score of the subject prior to administration of the MC4R agonist (e.g., an MC4R agonist described herein, e.g., SEQ ID NO: 140). In an embodiment, the subject experiences a reduction in the weekly average of the daily most hunger score greater than 0.3 relative to the weekly average of the daily most hunger score of the subject prior to administration of the MC4R agonist (e.g., an MC4R agonist described herein, e.g., SEQ ID NO: 140). In an embodiment, the subject experiences a reduction in the weekly average of the daily most hunger score greater than 0.4 relative to the weekly average of the daily most hunger score of the subject prior to administration of the MC4R agonist (e.g., an MC4R agonist described herein, e.g., SEQ ID NO: 140). In an embodiment, the subject experiences a reduction in the weekly average of the daily most hunger score greater than 0.5 relative to the weekly average of the daily most hunger score of the subject prior to administration of the MC4R agonist (e.g., an MC4R agonist described herein, e.g., SEQ ID NO: 140). In an embodiment, the subject experiences a reduction in the weekly average of the daily most hunger score greater than 0.6 relative to the weekly average of the daily most hunger score of the subject prior to administration of the MC4R agonist (e.g., an MC4R agonist described herein, e.g., SEQ ID NO: 140). In an embodiment, the subject experiences a reduction in the weekly average of the daily most hunger score greater than 0.7 relative to the weekly average of the daily most hunger score of the subject prior to administration of the MC4R agonist (e.g., an MC4R agonist described herein, e.g., SEQ ID NO: 140). In an embodiment, the subject experiences a reduction in the weekly average of the daily most hunger score greater than 0.8 relative to the weekly average of the daily most hunger score of the subject prior to administration of the MC4R agonist (e.g., an MC4R agonist described herein, e.g., SEQ ID NO: 140). In an embodiment, the subject experiences a reduction in the weekly average of the daily most hunger score greater than 0.9 relative to the weekly average of the daily most hunger score of the subject prior to administration of the MC4R agonist (e.g., an MC4R agonist described herein, e.g., SEQ ID NO: 140). In an embodiment, the subject experiences a reduction in the weekly average of the daily most hunger score greater than 1 relative to the weekly average of the daily most hunger score of the subject prior to administration of the MC4R agonist (e.g., an MC4R agonist described herein, e.g., SEQ ID NO: 140). In an embodiment, the subject experiences a reduction in the weekly average of the daily most hunger score greater than 1.2 relative to the weekly average of the daily most hunger score of the subject prior to administration of the MC4R agonist (e.g., an MC4R agonist described herein, e.g., SEQ ID NO: 140). In an embodiment, the subject experiences a reduction in the weekly average of the daily most hunger score greater than 1.4 relative to the weekly average of the daily most hunger score of the subject prior to administration of the MC4R agonist (e.g., an MC4R agonist described herein, e.g., SEQ ID NO: 140). In an embodiment, the subject experiences a reduction in the weekly average of the daily most hunger score greater than 1.6 relative to the weekly average of the daily most hunger score of the subject prior to administration of the MC4R agonist (e.g., an MC4R agonist described herein, e.g., SEQ ID NO: 140). In an embodiment, the subject experiences a reduction in the weekly average of the daily most hunger score greater than 1.8 relative to the weekly average of the daily most hunger score of the subject prior to administration of the MC4R agonist (e.g., an MC4R agonist described herein, e.g., SEQ ID NO: 140). In an embodiment, the subject experiences a reduction in the weekly average of the daily most hunger score greater than 2 relative to the weekly average of the daily most hunger score of the subject prior to administration of the MC4R agonist (e.g., an MC4R agonist described herein, e.g., SEQ ID NO: 140). In an embodiment, the subject experiences a reduction in the weekly average of the daily most hunger score greater than 2.5 relative to the weekly average of the daily most hunger score of the subject prior to administration of the MC4R agonist (e.g., an MC4R agonist described herein, e.g., SEQ ID NO: 140). In an embodiment, the subject experiences a reduction in the weekly average of the daily most hunger score greater than 3 relative to the weekly average of the daily most hunger score of the subject prior to administration of the MC4R agonist (e.g., an MC4R agonist described herein, e.g., SEQ ID NO: 140). In an embodiment, the subject experiences a reduction in the weekly average of the daily most hunger score greater than 3.5 relative to the weekly average of the daily most hunger score of the subject prior to administration of the MC4R agonist (e.g., an MC4R agonist described herein, e.g., SEQ ID NO: 140). In an embodiment, the subject experiences a reduction in the weekly average of the daily most hunger score greater than 4 relative to the weekly average of the daily most hunger score of the subject prior to administration of the MC4R agonist (e.g., an MC4R agonist described herein, e.g., SEQ ID NO: 140). In an embodiment, the subject experiences a reduction in the weekly average of the daily most hunger score greater than 4.5 relative to the weekly average of the daily most hunger score of the subject prior to administration of the MC4R agonist (e.g., an MC4R agonist described herein, e.g., SEQ ID NO: 140). In an embodiment, the subject experiences a reduction in the weekly average of the daily most hunger score greater than 5 relative to the weekly average of the daily most hunger score of the subject prior to administration of the MC4R agonist (e.g., an MC4R agonist described herein, e.g., SEQ ID NO: 140). In an embodiment, the subject experiences a reduction in the weekly average of the daily most hunger score greater than 5.5 relative to the weekly average of the daily most hunger score of the subject prior to administration of the MC4R agonist (e.g., an MC4R agonist described herein, e.g., SEQ ID NO: 140). In an embodiment, the subject experiences a reduction in the weekly average of the daily most hunger score greater than 6 relative to the weekly average of the daily most hunger score of the subject prior to administration of the MC4R agonist (e.g., an MC4R agonist described herein, e.g., SEQ ID NO: 140). In an embodiment, the subject experiences a reduction in the weekly average of the daily most hunger score greater than 6.5 relative to the weekly average of the daily most hunger score of the subject prior to administration of the MC4R agonist (e.g., an MC4R agonist described herein, e.g., SEQ ID NO: 140). In an embodiment, the subject experiences a reduction in the weekly average of the daily most hunger score greater than 7 relative to the weekly average of the daily most hunger score of the subject prior to administration of the MC4R agonist (e.g., an MC4R agonist described herein, e.g., SEQ ID NO: 140).

[0284] In an embodiment, the subject experiences a reduction in the weekly average of the daily most hunger score greater than 7 relative to the weekly average of the daily most hunger score of the subject prior to administration of the MC4R agonist (e.g., an MC4R agonist described herein, e.g., SEQ ID NO: 140).

[0285] In an embodiment, the subject experiences a reduction in the weekly average of the daily most hunger score between about 0.1 to about 7 relative to the weekly average of the daily most hunger score of the subject prior to administration of the MC4R agonist (e.g., an MC4R agonist described herein, e.g., SEQ ID NO: 140). In an embodiment, the subject experiences a reduction in the weekly average of the daily most hunger score between about 0.1 to about 6.5, 0.1 to about 6, 0.1 to about 6, 0.1 to about 5.5, 0.1 to about 5, 0.1 to about 4.5, 0.1 to about 4, 0.1 to about 3.5, 0.1 to about 3, 0.1 to about 2.5, 0.1 to about 2, 0.1 to about 1.8, 0.1 to about 1.6, 0.1 to about 1.4, 0.1 to about 1.2, 0.1 to about 1, 0.1 to about 0.9, 0.1 to about 0.8, 0.1 to about 0.7, 0.1 to about 0.6, 0.1 to about 0.5, 0.1 to about 0.4, 0.1 to about 0.3, or 0.1 to about 0.2 relative to the weekly average of the daily most hunger score of the subject prior to administration of the MC4R agonist (e.g., an MC4R agonist described herein, e.g., SEQ ID NO: 140). In an embodiment, the subject experiences a reduction in the weekly average of the daily most hunger score between about 0.1 to about 6.5 relative to the weekly average of the daily most hunger score of the subject prior to administration of the MC4R agonist (e.g., an MC4R agonist described herein, e.g., SEQ ID NO: 140). In an embodiment, the subject experiences a reduction in the weekly average of the daily most hunger score between about 0.1 to about 6 relative to the weekly average of the daily most hunger score of the subject prior to administration of the MC4R agonist (e.g., an MC4R agonist described herein, e.g., SEQ ID NO: 140). In an embodiment, the subject experiences a reduction in the weekly average of the daily most hunger score between about 0.1 to about 5.5 relative to the weekly average of the daily most hunger score of the subject prior to administration of the MC4R agonist (e.g., an MC4R agonist described herein, e.g., SEQ ID NO: 140). In an embodiment, the subject experiences a reduction in the weekly average of the daily most hunger score between about 0.1 to about 5 relative to the weekly average of the daily most hunger score of the subject prior to administration of the MC4R agonist (e.g., an MC4R agonist described herein, e.g., SEQ ID NO: 140). In an embodiment, the subject experiences a reduction in the weekly average of the daily most hunger score between about 0.1 to about 4.5 relative to the weekly average of the daily most hunger score of the subject prior to administration of the MC4R agonist (e.g., an MC4R agonist described herein, e.g., SEQ ID NO: 140). In an embodiment, the subject experiences a reduction in the weekly average of the daily most hunger score between about 0.1 to about 4 relative to the weekly average of the daily most hunger score of the subject prior to administration of the MC4R agonist (e.g., an MC4R agonist described herein, e.g., SEQ ID NO: 140). In an embodiment, the subject experiences a reduction in the weekly average of the daily most hunger score between about 0.1 to about 3.5 relative to the weekly average of the daily most hunger score of the subject prior to administration of the MC4R agonist (e.g., an MC4R agonist described herein, e.g., SEQ ID NO: 140). In an embodiment, the subject experiences a reduction in the weekly average of the daily most hunger score between about 0.1 to about 3 relative to the weekly average of the daily most hunger score of the subject prior to administration of the MC4R agonist (e.g., an MC4R agonist described herein, e.g., SEQ ID NO: 140). In an embodiment, the subject experiences a reduction in the weekly average of the daily most hunger score between about 0.1 to about 2.5 relative to the weekly average of the daily most hunger score of the subject prior to administration of the MC4R agonist (e.g., an MC4R agonist described herein, e.g., SEQ ID NO: 140). In an embodiment, the subject experiences a reduction in the weekly average of the daily most hunger score between about 0.1 to about 2 relative to the weekly average of the daily most hunger score of the subject prior to administration of the MC4R agonist (e.g., an MC4R agonist described herein, e.g., SEQ ID NO: 140). In an embodiment, the subject experiences a reduction in the weekly average of the daily most hunger score between about 0.1 to about 1.8 relative to the weekly average of the daily most hunger score of the subject prior to administration of the MC4R agonist (e.g., an MC4R agonist described herein, e.g., SEQ ID NO: 140). In an embodiment, the subject experiences a reduction in the weekly average of the daily most hunger score between about 0.1 to about 1.6 relative to the weekly average of the daily most hunger score of the subject prior to administration of the MC4R agonist (e.g., an MC4R agonist described herein, e.g., SEQ ID NO: 140). In an embodiment, the subject experiences a reduction in the weekly average of the daily most hunger score between about 0.1 to about 1.4 relative to the weekly average of the daily most hunger score of the subject prior to administration of the MC4R agonist (e.g., an MC4R agonist described herein, e.g., SEQ ID NO: 140). In an embodiment, the subject experiences a reduction in the weekly average of the daily most hunger score between about 0.1 to about 1.2 relative to the weekly average of the daily most hunger score of the subject prior to administration of the MC4R agonist (e.g., an MC4R agonist described herein, e.g., SEQ ID NO: 140). In an embodiment, the subject experiences a reduction in the weekly average of the daily most hunger score between about 0.1 to about 1 relative to the weekly average of the daily most hunger score of the subject prior to administration of the MC4R agonist (e.g., an MC4R agonist described herein, e.g., SEQ ID NO: 140). In an embodiment, the subject experiences a reduction in the weekly average of the daily most hunger score between about 0.1 to about 0.9 relative to the weekly average of the daily most hunger score of the subject prior to administration of the MC4R agonist (e.g., an MC4R agonist described herein, e.g., SEQ ID NO: 140). In an embodiment, the subject experiences a reduction in the weekly average of the daily most hunger score between about 0.1 to about 0.8 relative to the weekly average of the daily most hunger score of the subject prior to administration of the MC4R agonist (e.g., an MC4R agonist described herein, e.g., SEQ ID NO: 140). In an embodiment, the subject experiences a reduction in the weekly average of the daily most hunger score between about 0.1 to about 0.7 relative to the weekly average of the daily most hunger score of the subject prior to administration of the MC4R agonist (e.g., an MC4R agonist described herein, e.g., SEQ ID NO: 140). In an embodiment, the subject experiences a reduction in the weekly average of the daily most hunger score between about 0.1 to about m0.6 relative to the weekly average of the daily most hunger score of the subject prior to administration of the MC4R agonist (e.g., an MC4R agonist described herein, e.g., SEQ ID NO: 140). In an embodiment, the subject experiences a reduction in the weekly average of the daily most hunger score between about 0.1 to about 0.5 relative to the weekly average of the daily most hunger score of the subject prior to administration of the MC4R agonist (e.g., an MC4R agonist described herein, e.g., SEQ ID NO: 140). In an embodiment, the subject experiences a reduction in the weekly average of the daily most hunger score between about 0.1 to about 0.4 relative to the weekly average of the daily most hunger score of the subject prior to administration of the MC4R agonist (e.g., an MC4R agonist described herein, e.g., SEQ ID NO: 140). In an embodiment, the subject experiences a reduction in the weekly average of the daily most hunger score between about 0.1 to about 0.3 relative to the weekly average of the daily most hunger score of the subject prior to administration of the MC4R agonist (e.g., an MC4R agonist described herein, e.g., SEQ ID NO: 140). In an embodiment, the subject experiences a reduction in the weekly average of the daily most hunger score between about 0.1 to about 0.2 relative to the weekly average of the daily most hunger score of the subject prior to administration of the MC4R agonist (e.g., an MC4R agonist described herein, e.g., SEQ ID NO: 140).

[0286] In an embodiment, the subject experiences a reduction in the weekly average of the daily most hunger score between about 1 to about 7 relative to the daily most hunger score of the subject prior to administration of the MC4R agonist (e.g., an MC4R agonist described herein, e.g., SEQ ID NO: 140). In an embodiment, the subject experiences a reduction in the weekly average of the daily most hunger score between about 1 to about 6.5, 1 to about 6, 1 to about 5.5, 1 to about 5, 1 to about 4.5, 1 to about 4, 1 to about 3.5, 1 to about 3, 1 to about 2.5, 1 to about 2, 1 to about 1.8, 1 to about 1.6, 1 to about 1.4 or 1 to about 1.2 relative to the weekly average of the daily most hunger score of the subject prior to administration of the MC4R agonist (e.g., an MC4R agonist described herein, e.g., SEQ ID NO: 140). In an embodiment, the subject experiences a reduction in the weekly average of the daily most hunger score between about 1 to about 6.5 relative to the daily most hunger score of the subject prior to administration of the agonist (e.g., an MC4R agonist described herein, e.g., SEQ ID NO: 140). In an embodiment, the subject experiences a reduction in the weekly average of the daily most hunger score between about 1 to about 6 relative to the daily most hunger score of the subject prior to administration of the agonist (e.g., an MC4R agonist described herein, e.g., SEQ ID NO: 140). In an embodiment, the subject experiences a reduction in the weekly average of the daily most hunger score between about 1 to about 5.5 relative to the daily most hunger score of the subject prior to administration of the agonist (e.g., an MC4R agonist described herein, e.g., SEQ ID NO: 140). In an embodiment, the subject experiences a reduction in the weekly average of the daily most hunger score between about 1 to about 5 relative to the daily most hunger score of the subject prior to administration of the agonist (e.g., an MC4R agonist described herein, e.g., SEQ ID NO: 140). In an embodiment, the subject experiences a reduction in the weekly average of the daily most hunger score between about 1 to about 4.5 relative to the daily most hunger score of the subject prior to administration of the agonist (e.g., an MC4R agonist described herein, e.g., SEQ ID NO: 140). In an embodiment, the subject experiences a reduction in the weekly average of the daily most hunger score between about 1 to about 4 relative to the daily most hunger score of the subject prior to administration of the agonist (e.g., an MC4R agonist described herein, e.g., SEQ ID NO: 140). In an embodiment, the subject experiences a reduction in the weekly average of the daily most hunger score between about 1 to about 3.5 relative to the daily most hunger score of the subject prior to administration of the agonist (e.g., an MC4R agonist described herein, e.g., SEQ ID NO: 140). In an embodiment, the subject experiences a reduction in the weekly average of the daily most hunger score between about 1 to about 3 relative to the daily most hunger score of the subject prior to administration of the agonist (e.g., an MC4R agonist described herein, e.g., SEQ ID NO: 140). In an embodiment, the subject experiences a reduction in the weekly average of the daily most hunger score between about 1 to about 2.5 relative to the daily most hunger score of the subject prior to administration of the agonist (e.g., an MC4R agonist described herein, e.g., SEQ ID NO: 140). In an embodiment, the subject experiences a reduction in the weekly average of the daily most hunger score between about 1 to about 2 relative to the daily most hunger score of the subject prior to administration of the agonist (e.g., an MC4R agonist described herein, e.g., SEQ ID NO: 140). In an embodiment, the subject experiences a reduction in the weekly average of the daily most hunger score between about 1 to about 1.8 relative to the daily most hunger score of the subject prior to administration of the agonist (e.g., an MC4R agonist described herein, e.g., SEQ ID NO: 140). In an embodiment, the subject experiences a reduction in the weekly average of the daily most hunger score between about 1 to about 1.6 relative to the daily most hunger score of the subject prior to administration of the agonist (e.g., an MC4R agonist described herein, e.g., SEQ ID NO: 140). In an embodiment, the subject experiences a reduction in the weekly average of the daily most hunger score between about 1 to about 1.4 relative to the daily most hunger score of the subject prior to administration of the agonist (e.g., an MC4R agonist described herein, e.g., SEQ ID NO: 140). In an embodiment, the subject experiences a reduction in the weekly average of the daily most hunger score between about 1 to about 1.2 relative to the daily most hunger score of the subject prior to administration of the agonist (e.g., an MC4R agonist described herein, e.g., SEQ ID NO: 140).

[0287] In an embodiment, the subject experiences a reduction in the weekly average of the daily most hunger score between about 2 to about 7 relative to the daily most hunger score of the subject prior to administration of the MC4R agonist (e.g., an MC4R agonist described herein, e.g., SEQ ID NO: 140). In an embodiment, the subject experiences a reduction in the weekly average of the daily most hunger score between about 2 to about 6.5, 2 to about 6, 2 to about 5.5, 2 to about 5, 2 to about 4.5, 2 to about 4, 2 to about 3.5, 2 to about 3, or 2 to about 2.5. In an embodiment, the subject experiences a reduction in the weekly average of the daily most hunger score between about 2 to about 6.5 relative to the weekly average of the daily most hunger score of the subject prior to administration of the MC4R agonist (e.g., an MC4R agonist described herein, e.g., SEQ ID NO: 140). In an embodiment, the subject experiences a reduction in the weekly average of the daily most hunger score between about 2 to about 6 relative to the weekly average of the daily most hunger score of the subject prior to administration of the MC4R agonist (e.g., an MC4R agonist described herein, e.g., SEQ ID NO: 140). In an embodiment, the subject experiences a reduction in the weekly average of the daily most hunger score between about 2 to about 5.5 relative to the weekly average of the daily most hunger score of the subject prior to administration of the MC4R agonist (e.g., an MC4R agonist described herein, e.g., SEQ ID NO: 140). In an embodiment, the subject experiences a reduction in the weekly average of the daily most hunger score between about 2 to about 5 relative to the weekly average of the daily most hunger score of the subject prior to administration of the MC4R agonist (e.g., an MC4R agonist described herein, e.g., SEQ ID NO: 140). In an embodiment, the subject experiences a reduction in the weekly average of the daily most hunger score between about 2 to about 4.5 relative to the weekly average of the daily most hunger score of the subject prior to administration of the MC4R agonist (e.g., an MC4R agonist described herein, e.g., SEQ ID NO: 140). In an embodiment, the subject experiences a reduction in the weekly average of the daily most hunger score between about 2 to about 4 relative to the weekly average of the daily most hunger score of the subject prior to administration of the MC4R agonist (e.g., an MC4R agonist described herein, e.g., SEQ ID NO: 140). In an embodiment, the subject experiences a reduction in the weekly average of the daily most hunger score between about 2 to about 3.5 relative to the weekly average of the daily most hunger score of the subject prior to administration of the MC4R agonist (e.g., an MC4R agonist described herein, e.g., SEQ ID NO: 140). In an embodiment, the subject experiences a reduction in the weekly average of the daily most hunger score between about 2 to about 3 relative to the weekly average of the daily most hunger score of the subject prior to administration of the MC4R agonist (e.g., an MC4R agonist described herein, e.g., SEQ ID NO: 140). In an embodiment, the subject experiences a reduction in the weekly average of the daily most hunger score between about 2 to about 2.5 relative to the weekly average of the daily most hunger score of the subject prior to administration of the MC4R agonist (e.g., an MC4R agonist described herein, e.g., SEQ ID NO: 140).

[0288] In an embodiment, the subject experiences a reduction in the weekly average of the daily most hunger score between about 3 to about 7 relative to the daily most hunger score of the subject prior to administration of the MC4R agonist (e.g., an MC4R agonist described herein, e.g., SEQ ID NO: 140). In an embodiment, the subject experiences a reduction in the weekly average of the daily most hunger score between about 3 to about 6.5, 3 to about 6, 3 to about 5.5, 3 to about 5, 3 to about 4.5, 3 to about 4, or 3 to about 3.5 relative to the weekly average of the daily most hunger score of the subject prior to administration of the MC4R agonist (e.g., an MC4R agonist described herein, e.g., SEQ ID NO: 140). In an embodiment, the subject experiences a reduction in the weekly average of the daily most hunger score between about 3 to about 6.5 relative to the daily most hunger score of the subject prior to administration of the MC4R agonist (e.g., an MC4R agonist described herein, e.g., SEQ ID NO: 140). In an embodiment, the subject experiences a reduction in the weekly average of the daily most hunger score between about 3 to about 6 relative to the daily most hunger score of the subject prior to administration of the MC4R agonist (e.g., an MC4R agonist described herein, e.g., SEQ ID NO: 140). In an embodiment, the subject experiences a reduction in the weekly average of the daily most hunger score between about 3 to about 5.5 relative to the daily most hunger score of the subject prior to administration of the MC4R agonist (e.g., an MC4R agonist described herein, e.g., SEQ ID NO: 140). In an embodiment, the subject experiences a reduction in the weekly average of the daily most hunger score between about 3 to about 5 relative to the daily most hunger score of the subject prior to administration of the MC4R agonist (e.g., an MC4R agonist described herein, e.g., SEQ ID NO: 140). In an embodiment, the subject experiences a reduction in the weekly average of the daily most hunger score between about 3 to about 4.5 relative to the daily most hunger score of the subject prior to administration of the MC4R agonist (e.g., an MC4R agonist described herein, e.g., SEQ ID NO: 140). In an embodiment, the subject experiences a reduction in the weekly average of the daily most hunger score between about 3 to about 4 relative to the daily most hunger score of the subject prior to administration of the MC4R agonist (e.g., an MC4R agonist described herein, e.g., SEQ ID NO: 140). In an embodiment, the subject experiences a reduction in the weekly average of the daily most hunger score between about 3 to about 3.5 relative to the daily most hunger score of the subject prior to administration of the MC4R agonist (e.g., an MC4R agonist described herein, e.g., SEQ ID NO: 140).

[0289] In an embodiment, the subject experiences a reduction in the weekly average of the daily most hunger score between about 4 to about 7 relative to the daily most hunger score of the subject prior to administration of the MC4R agonist (e.g., an MC4R agonist described herein, e.g., SEQ ID NO: 140). In an embodiment, the subject experiences a reduction in the weekly average of the daily most hunger score between about 4 to about 6.5, 4 to about 6, 4 to about 5.5, 4 to about 5, or 4 to about 4.5 relative to the daily most hunger score of the subject prior to administration of the MC4R agonist (e.g., an MC4R agonist described herein, e.g., SEQ ID NO: 140). In an embodiment, the subject experiences a reduction in the weekly average of the daily most hunger score between about 4 to about 6.5 relative to the daily most hunger score of the subject prior to administration of the MC4R agonist (e.g., an MC4R agonist described herein, e.g., SEQ ID NO: 140). In an embodiment, the subject experiences a reduction in the weekly average of the daily most hunger score between about 4 to about 6 relative to the daily most hunger score of the subject prior to administration of the MC4R agonist (e.g., an MC4R agonist described herein, e.g., SEQ ID NO: 140). In an embodiment, the subject experiences a reduction in the weekly average of the daily most hunger score between about 4 to about 5.5 relative to the daily most hunger score of the subject prior to administration of the MC4R agonist (e.g., an MC4R agonist described herein, e.g., SEQ ID NO: 140). In an embodiment, the subject experiences a reduction in the weekly average of the daily most hunger score between about 4 to about 5 relative to the daily most hunger score of the subject prior to administration of the MC4R agonist (e.g., an MC4R agonist described herein, e.g., SEQ ID NO: 140). In an embodiment, the subject experiences a reduction in the weekly average of the daily most hunger score between about 4 to about 4.5 relative to the daily most hunger score of the subject prior to administration of the MC4R agonist (e.g., an MC4R agonist described herein, e.g., SEQ ID NO: 140).

[0290] In an embodiment, the subject experiences a reduction in the weekly average of the daily most hunger score between about 5 to about 7 relative to the daily most hunger score of the subject prior to administration of the MC4R agonist (e.g., an MC4R agonist described herein, e.g., SEQ ID NO: 140). In an embodiment, the subject experiences a reduction in the weekly average of the daily most hunger score between about 5 to about 6.5, 5 to about 6, or 5 to about 5.5 relative to the daily most hunger score of the subject prior to administration of the MC4R agonist (e.g., an MC4R agonist described herein, e.g., SEQ ID NO: 140). In an embodiment, the subject experiences a reduction in the weekly average of the daily most hunger score between about 5 to about 6.5 relative to the daily most hunger score of the subject prior to administration of the MC4R agonist (e.g., an MC4R agonist described herein, e.g., SEQ ID NO: 140). In an embodiment, the subject experiences a reduction in the weekly average of the daily most hunger score between about 5 to about 6 relative to the daily most hunger score of the subject prior to administration of the MC4R agonist (e.g., an MC4R agonist described herein, e.g., SEQ ID NO: 140). In an embodiment, the subject experiences a reduction in the weekly average of the daily most hunger score between about 5 to about 5.5 relative to the daily most hunger score of the subject prior to administration of the MC4R agonist (e.g., an MC4R agonist described herein, e.g., SEQ ID NO: 140).

[0291] In an embodiment, the subject experiences a reduction in the weekly average of the daily most hunger score between about 6 to about 7 relative to the daily most hunger score of the subject prior to administration of the MC4R agonist (e.g., an MC4R agonist described herein, e.g., SEQ ID NO: 140). In an embodiment, the subject experiences a reduction in the weekly average of the daily most hunger score between about 6 to about 6.5 relative to the daily most hunger score of the subject prior to administration of the MC4R agonist (e.g., an MC4R agonist described herein, e.g., SEQ ID NO: 140).

[0292] In an embodiment, the subject experiences a reduction in the weekly average of the daily most hunger score of less than 7 relative to the weekly average of the daily most hunger score of the subject prior to administration of the MC4R agonist (e.g., an MC4R agonist described herein, e.g., SEQ ID NO: 140). In embodiments, the subject experiences a reduction in the weekly average of the daily most hunger score of less than 6.5, 6, 5.5, 5, 4.5, 4, 3.5, 3., 2.5, 2., 1.8, 1.6, 1.4, 1.2, 1, 0.9, 0.8, 0.7, 0.6, 0.5, 0.4, 0.3, 0.2, 0.1 or less relative the weekly average of the daily most hunger score of the subject prior to administration of the MC4R agonist (e.g., an MC4R agonist described herein, e.g., SEQ ID NO: 140). In an embodiment, the subject experiences a reduction in the weekly average of the daily most hunger score of less than 6.5 relative to the weekly average of the daily most hunger score of the subject prior to administration of the MC4R agonist (e.g., an MC4R agonist described herein, e.g., SEQ ID NO: 140). In an embodiment, the subject experiences a reduction in the weekly average of the daily most hunger score of less than 6 relative to the weekly average of the daily most hunger score of the subject prior to administration of the MC4R agonist (e.g., an MC4R agonist described herein, e.g., SEQ ID NO: 140). In an embodiment, the subject experiences a reduction in the weekly average of the daily most hunger score of less than 5.5 relative to the weekly average of the daily most hunger score of the subject prior to administration of the MC4R agonist (e.g., an MC4R agonist described herein, e.g., SEQ ID NO: 140). In an embodiment, the subject experiences a reduction in the weekly average of the daily most hunger score of less than 5 relative to the weekly average of the daily most hunger score of the subject prior to administration of the MC4R agonist (e.g., an MC4R agonist described herein, e.g., SEQ ID NO: 140). In an embodiment, the subject experiences a reduction in the weekly average of the daily most hunger score of less than 4.5 relative to the weekly average of the daily most hunger score of the subject prior to administration of the MC4R agonist (e.g., an MC4R agonist described herein, e.g., SEQ ID NO: 140). In an embodiment, the subject experiences a reduction in the weekly average of the daily most hunger score of less than 4 relative to the weekly average of the daily most hunger score of the subject prior to administration of the MC4R agonist (e.g., an MC4R agonist described herein, e.g., SEQ ID NO: 140). In an embodiment, the subject experiences a reduction in the weekly average of the daily most hunger score of less than 3.5 relative to the weekly average of the daily most hunger score of the subject prior to administration of the MC4R agonist (e.g., an MC4R agonist described herein, e.g., SEQ ID NO: 140). In an embodiment, the subject experiences a reduction in the weekly average of the daily most hunger score of less than 3 relative to the weekly average of the daily most hunger score of the subject prior to administration of the MC4R agonist (e.g., an MC4R agonist described herein, e.g., SEQ ID NO: 140). In an embodiment, the subject experiences a reduction in the weekly average of the daily most hunger score of less than 2.5 relative to the weekly average of the daily most hunger score of the subject prior to administration of the MC4R agonist (e.g., an MC4R agonist described herein, e.g., SEQ ID NO: 140). In an embodiment, the subject experiences a reduction in the weekly average of the daily most hunger score of less than 2 relative to the weekly average of the daily most hunger score of the subject prior to administration of the MC4R agonist (e.g., an MC4R agonist described herein, e.g., SEQ ID NO: 140). In an embodiment, the subject experiences a reduction in the weekly average of the daily most hunger score of less than 1.8 relative to the weekly average of the daily most hunger score of the subject prior to administration of the MC4R agonist (e.g., an MC4R agonist described herein, e.g., SEQ ID NO: 140). In an embodiment, the subject experiences a reduction in the weekly average of the daily most hunger score of less than 1.6 relative to the weekly average of the daily most hunger score of the subject prior to administration of the MC4R agonist (e.g., an MC4R agonist described herein, e.g., SEQ ID NO: 140). In an embodiment, the subject experiences a reduction in the weekly average of the daily most hunger score of less than 1.4 relative to the weekly average of the daily most hunger score of the subject prior to administration of the MC4R agonist (e.g., an MC4R agonist described herein, e.g., SEQ ID NO: 140). In an embodiment, the subject experiences a reduction in the weekly average of the daily most hunger score of less than 1.2 relative to the weekly average of the daily most hunger score of the subject prior to administration of the MC4R agonist (e.g., an MC4R agonist described herein, e.g., SEQ ID NO: 140). In an embodiment, the subject experiences a reduction in the weekly average of the daily most hunger score of less than 1 relative to the weekly average of the daily most hunger score of the subject prior to administration of the MC4R agonist (e.g., an MC4R agonist described herein, e.g., SEQ ID NO: 140). In an embodiment, the subject experiences a reduction in the weekly average of the daily most hunger score of less than 0.9 relative to the weekly average of the daily most hunger score of the subject prior to administration of the MC4R agonist (e.g., an MC4R agonist described herein, e.g., SEQ ID NO: 140). In an embodiment, the subject experiences a reduction in the weekly average of the daily most hunger score of less than 0.8 relative to the weekly average of the daily most hunger score of the subject prior to administration of the MC4R agonist (e.g., an MC4R agonist described herein, e.g., SEQ ID NO: 140). In an embodiment, the subject experiences a reduction in the weekly average of the daily most hunger score of less than 0.7 relative to the weekly average of the daily most hunger score of the subject prior to administration of the MC4R agonist (e.g., an MC4R agonist described herein, e.g., SEQ ID NO: 140). In an embodiment, the subject experiences a reduction in the weekly average of the daily most hunger score of less than 0.6 relative to the weekly average of the daily most hunger score of the subject prior to administration of the MC4R agonist (e.g., an MC4R agonist described herein, e.g., SEQ ID NO: 140). In an embodiment, the subject experiences a reduction in the weekly average of the daily most hunger score of less than 0.5 relative to the weekly average of the daily most hunger score of the subject prior to administration of the MC4R agonist (e.g., an MC4R agonist described herein, e.g., SEQ ID NO: 140). In an embodiment, the subject experiences a reduction in the weekly average of the daily most hunger score of less than 0.4 relative to the weekly average of the daily most hunger score of the subject prior to administration of the MC4R agonist (e.g., an MC4R agonist described herein, e.g., SEQ ID NO: 140). In an embodiment, the subject experiences a reduction in the weekly average of the daily most hunger score of less than 0.3 relative to the weekly average of the daily most hunger score of the subject prior to administration of the MC4R agonist (e.g., an MC4R agonist described herein, e.g., SEQ ID NO: 140). In an embodiment, the subject experiences a reduction in the weekly average of the daily most hunger score of less than 0.2 relative to the weekly average of the daily most hunger score of the subject prior to administration of the MC4R agonist (e.g., an MC4R agonist described herein, e.g., SEQ ID NO: 140). In an embodiment, the subject experiences a reduction in the weekly average of the daily most hunger score of less than 0.1 relative to the weekly average of the daily most hunger score of the subject prior to administration of the MC4R agonist (e.g., an MC4R agonist described herein, e.g., SEQ ID NO: 140).

[0293] In embodiments, methods described herein result in an improvement in the IWQOL or IWQOL-Lite Quality of life score of the subject compared to a control (e.g., IWQOL or IWQOL-Lite score of the subject prior to treatment or a predetermined value, e.g., average IWQOL or IWQOL-Lite score of an obese human population of similar age and gender as the subject not subjected to therapeutic intervention, or the IWQOL or IWQOL-Lite score of the subject at a previous measurement, e.g., at a previous visit.

[0294] A subject may experience an improvement in the IWQOL or IWQOL-Lite Quality of Life score upon administration of the MC4R agonist (e.g., an MC4R agonist described herein, e.g., SEQ ID NO: 140). For example, the subject may experience an improvement in the IWQOL or IWQOL-Lite Quality of Life score greater than 5 points relative to the IWQOL or IWQOL-Lite Quality of Life score of the subject prior to the administration of the MC4R agonist (e.g., an MC4R agonist described herein, e.g., SEQ ID 140). In an embodiment, the subject experiences an improvement in the IWQOL or IWQOL-Lite Quality of Life score greater than 6, 7, 8, 9, 10, 12, 14, 16, 18, 20, 25, 30, 35, 40 points or more relative to the IWQOL or IWQOL-Lite Quality of Life score of the subject prior to the administration of the MC4R agonist (e.g., an MC4R agonist described herein, e.g., SEQ ID NO: 140). For example, the subject may experience an improvement in the IWQOL or IWQOL-Lite Quality of Life score greater than 6 points relative to the IWQOL or IWQOL-Lite Quality of Life score of the subject prior to the administration of the MC4R agonist (e.g., an MC4R agonist described herein, e.g., SEQ ID 140). For example, the subject may experience an improvement in the IWQOL or IWQOL-Lite Quality of Life score greater than 7 points relative to the IWQOL or IWQOL-Lite Quality of Life score of the subject prior to the administration of the MC4R agonist (e.g., an MC4R agonist described herein, e.g., SEQ ID 140). For example, the subject may experience an improvement in the IWQOL or IWQOL-Lite Quality of Life score greater than 8 points relative to the IWQOL or IWQOL-Lite Quality of Life score of the subject prior to the administration of the MC4R agonist (e.g., an MC4R agonist described herein, e.g., SEQ ID 140). For example, the subject may experience an improvement in the IWQOL or IWQOL-Lite Quality of Life score greater than 9 points relative to the IWQOL or IWQOL-Lite Quality of Life score of the subject prior to the administration of the MC4R agonist (e.g., an MC4R agonist described herein, e.g., SEQ ID 140). For example, the subject may experience an improvement in the IWQOL or IWQOL-Lite Quality of Life score greater than 10 points relative to the IWQOL or IWQOL-Lite Quality of Life score of the subject prior to the administration of the MC4R agonist (e.g., an MC4R agonist described herein, e.g., SEQ ID 140). For example, the subject may experience an improvement in the IWQOL or IWQOL-Lite Quality of Life score greater than 12 points relative to the IWQOL or IWQOL-Lite Quality of Life score of the subject prior to the administration of the MC4R agonist (e.g., an MC4R agonist described herein, e.g., SEQ ID 140). For example, the subject may experience an improvement in the IWQOL or IWQOL-Lite Quality of Life score greater than 14 points relative to the IWQOL or IWQOL-Lite Quality of Life score of the subject prior to the administration of the MC4R agonist (e.g., an MC4R agonist described herein, e.g., SEQ ID 140). For example, the subject may experience an improvement in the IWQOL or IWQOL-Lite Quality of Life score greater than 16 points relative to the IWQOL or IWQOL-Lite Quality of Life score of the subject prior to the administration of the MC4R agonist (e.g., an MC4R agonist described herein, e.g., SEQ ID 140). For example, the subject may experience an improvement in the IWQOL or IWQOL-Lite Quality of Life score greater than 18 points relative to the IWQOL or IWQOL-Lite Quality of Life score of the subject prior to the administration of the MC4R agonist (e.g., an MC4R agonist described herein, e.g., SEQ ID 140). For example, the subject may experience an improvement in the IWQOL or IWQOL-Lite Quality of Life score greater than 20 points relative to the IWQOL or IWQOL-Lite Quality of Life score of the subject prior to the administration of the MC4R agonist (e.g., an MC4R agonist described herein, e.g., SEQ ID 140). For example, the subject may experience an improvement in the IWQOL or IWQOL-Lite Quality of Life score greater than 25 points relative to the IWQOL or IWQOL-Lite Quality of Life score of the subject prior to the administration of the MC4R agonist (e.g., an MC4R agonist described herein, e.g., SEQ ID 140). For example, the subject may experience an improvement in the IWQOL or IWQOL-Lite Quality of Life score greater than 30 points relative to the IWQOL or IWQOL-Lite Quality of Life score of the subject prior to the administration of the MC4R agonist (e.g., an MC4R agonist described herein, e.g., SEQ ID 140). For example, the subject may experience an improvement in the IWQOL or IWQOL-Lite Quality of Life score greater than 35 points relative to the IWQOL or IWQOL-Lite Quality of Life score of the subject prior to the administration of the MC4R agonist (e.g., an MC4R agonist described herein, e.g., SEQ ID 140). For example, the subject may experience an improvement in the IWQOL or IWQOL-Lite Quality of Life score greater than 40 points relative to the IWQOL or IWQOL-Lite Quality of Life score of the subject prior to the administration of the MC4R agonist (e.g., an MC4R agonist described herein, e.g., SEQ ID 140).

[0295] In an embodiment, the subject experiences an improvement in the IWQOL or IWQOL-Lite Quality of Life score between about 5 to about 40 points relative to the IWQOL or IWQOL-Lite Quality of Life score of the subject prior to administration of the MC4R agonist (e.g., an MC4R agonist described herein, e.g., an MC4R agonist, e.g., SEQ ID NO: 140). In an embodiment, the subject experiences an improvement in the IWQOL or IWQOL-Lite Quality of Life score between about 5 to about 35 points, 5 to about 30 points, 5 to about 25 points, 5 to about 20 points, 5 to about 18 points, 5 to about 16 points, 5 to about 14 points, 5 to about 12 points, 5 to about 10 points, 5 to about 9 points, 5 to about 8 points, 5 to about 7 points, 5 to about 6 points relative to the IWQOL or IWQOL-Lite Quality of Life score of the subject prior to administration of the MC4R agonist (e.g., an MC4R agonist described herein, e.g., an MC4R agonist, e.g., SEQ ID NO: 140). In an embodiment, the subject experiences an improvement in the IWQOL or IWQOL-Lite Quality of Life score between about 5 to about 35 points relative to the IWQOL or IWQOL-Lite Quality of Life score of the subject prior to administration of the MC4R agonist (e.g., an MC4R agonist described herein, e.g., an MC4R agonist, e.g., SEQ ID NO: 140). In an embodiment, the subject experiences an improvement in the IWQOL or IWQOL-Lite Quality of Life score between about 5 to about 30 points relative to the IWQOL or IWQOL-Lite Quality of Life score of the subject prior to administration of the MC4R agonist (e.g., an MC4R agonist described herein, e.g., an MC4R agonist, e.g., SEQ ID NO: 140). In an embodiment, the subject experiences an improvement in the IWQOL or IWQOL-Lite Quality of Life score between about 5 to about 25 points relative to the IWQOL or IWQOL-Lite Quality of Life score of the subject prior to administration of the MC4R agonist (e.g., an MC4R agonist described herein, e.g., an MC4R agonist, e.g., SEQ ID NO: 140). In an embodiment, the subject experiences an improvement in the IWQOL or IWQOL-Lite Quality of Life score between about 5 to about 20 points relative to the IWQOL or IWQOL-Lite Quality of Life score of the subject prior to administration of the MC4R agonist (e.g., an MC4R agonist described herein, e.g., an MC4R agonist, e.g., SEQ ID NO: 140). In an embodiment, the subject experiences an improvement in the IWQOL or IWQOL-Lite Quality of Life score between about 5 to about 18 points relative to the IWQOL or IWQOL-Lite Quality of Life score of the subject prior to administration of the MC4R agonist (e.g., an MC4R agonist described herein, e.g., an MC4R agonist, e.g., SEQ ID NO: 140). In an embodiment, the subject experiences an improvement in the IWQOL or IWQOL-Lite Quality of Life score between about 5 to about 16 points relative to the IWQOL or IWQOL-Lite Quality of Life score of the subject prior to administration of the MC4R agonist (e.g., an MC4R agonist described herein, e.g., an MC4R agonist, e.g., SEQ ID NO: 140). In an embodiment, the subject experiences an improvement in the IWQOL or IWQOL-Lite Quality of Life score between about 5 to about 14 points relative to the IWQOL or IWQOL-Lite Quality of Life score of the subject prior to administration of the MC4R agonist (e.g., an MC4R agonist described herein, e.g., an MC4R agonist, e.g., SEQ ID NO: 140). In an embodiment, the subject experiences an improvement in the IWQOL or IWQOL-Lite Quality of Life score between about 5 to about 12 points relative to the IWQOL or IWQOL-Lite Quality of Life score of the subject prior to administration of the MC4R agonist (e.g., an MC4R agonist described herein, e.g., an MC4R agonist, e.g., SEQ ID NO: 140). In an embodiment, the subject experiences an improvement in the IWQOL or IWQOL-Lite Quality of Life score between about 5 to about 10 points relative to the IWQOL or IWQOL-Lite Quality of Life score of the subject prior to administration of the MC4R agonist (e.g., an MC4R agonist described herein, e.g., an MC4R agonist, e.g., SEQ ID NO: 140). In an embodiment, the subject experiences an improvement in the IWQOL or IWQOL-Lite Quality of Life score between about 5 to about 9 points relative to the IWQOL or IWQOL-Lite Quality of Life score of the subject prior to administration of the MC4R agonist (e.g., an MC4R agonist described herein, e.g., an MC4R agonist, e.g., SEQ ID NO: 140). In an embodiment, the subject experiences an improvement in the IWQOL or IWQOL-Lite Quality of Life score between about 5 to about 8 points relative to the IWQOL or IWQOL-Lite Quality of Life score of the subject prior to administration of the MC4R agonist (e.g., an MC4R agonist described herein, e.g., an MC4R agonist, e.g., SEQ ID NO: 140). In an embodiment, the subject experiences an improvement in the IWQOL or IWQOL-Lite Quality of Life score between about 5 to about 7 points relative to the IWQOL or IWQOL-Lite Quality of Life score of the subject prior to administration of the MC4R agonist (e.g., an MC4R agonist described herein, e.g., an MC4R agonist, e.g., SEQ ID NO: 140). In an embodiment, the subject experiences an improvement in the IWQOL or IWQOL-Lite Quality of Life score between about 5 to about 6 points relative to the IWQOL or IWQOL-Lite Quality of Life score of the subject prior to administration of the MC4R agonist (e.g., an MC4R agonist described herein, e.g., an MC4R agonist, e.g., SEQ ID NO: 140).

[0296] In an embodiment, the subject experiences an improvement in the IWQOL or IWQOL-Lite Quality of Life score between about 10 to about 40 points relative to the IWQOL or IWQOL-Lite Quality of Life score of the subject prior to administration of the MC4R agonist (e.g., an MC4R agonist described herein, e.g., an MC4R agonist, e.g., SEQ ID NO: 140). In an embodiment, the subject experiences an improvement in the IWQOL or IWQOL-Lite Quality of Life score between about 10 to about 35 points, 10 to about 30 points, 10 to about 25 points, 10 to about 20 points, 10 to about 18 points, 10 to about 16 points, 10 to about 14 points, or 10 to about 12 points relative to the IWQOL or IWQOL-Lite Quality of Life score of the subject prior to administration of the MC4R agonist (e.g., an MC4R agonist described herein, e.g., an MC4R agonist, e.g., SEQ ID NO: 140). In an embodiment, the subject experiences an improvement in the IWQOL or IWQOL-Lite Quality of Life score between about 10 to about 35 points relative to the IWQOL or IWQOL-Lite Quality of Life score of the subject prior to administration of the MC4R agonist (e.g., an MC4R agonist described herein, e.g., an MC4R agonist, e.g., SEQ ID NO: 140). In an embodiment, the subject experiences an improvement in the IWQOL or IWQOL-Lite Quality of Life score between about 10 to about 30 points relative to the IWQOL or IWQOL-Lite Quality of Life score of the subject prior to administration of the MC4R agonist (e.g., an MC4R agonist described herein, e.g., an MC4R agonist, e.g., SEQ ID NO: 140). In an embodiment, the subject experiences an improvement in the IWQOL or IWQOL-Lite Quality of Life score between about 10 to about 25 points relative to the IWQOL or IWQOL-Lite Quality of Life score of the subject prior to administration of the MC4R agonist (e.g., an MC4R agonist described herein, e.g., an MC4R agonist, e.g., SEQ ID NO: 140). In an embodiment, the subject experiences an improvement in the IWQOL or IWQOL-Lite Quality of Life score between about 10 to about 20 points relative to the IWQOL or IWQOL-Lite Quality of Life score of the subject prior to administration of the MC4R agonist (e.g., an MC4R agonist described herein, e.g., an MC4R agonist, e.g., SEQ ID NO: 140). In an embodiment, the subject experiences an improvement in the IWQOL or IWQOL-Lite Quality of Life score between about 10 to about 18 points relative to the IWQOL or IWQOL-Lite Quality of Life score of the subject prior to administration of the MC4R agonist (e.g., an MC4R agonist described herein, e.g., an MC4R agonist, e.g., SEQ ID NO: 140). In an embodiment, the subject experiences an improvement in the IWQOL or IWQOL-Lite Quality of Life score between about 10 to about 16 points relative to the IWQOL or IWQOL-Lite Quality of Life score of the subject prior to administration of the MC4R agonist (e.g., an MC4R agonist described herein, e.g., an MC4R agonist, e.g., SEQ ID NO: 140). In an embodiment, the subject experiences an improvement in the IWQOL or IWQOL-Lite Quality of Life score between about 10 to about 14 points relative to the IWQOL or IWQOL-Lite Quality of Life score of the subject prior to administration of the MC4R agonist (e.g., an MC4R agonist described herein, e.g., an MC4R agonist, e.g., SEQ ID NO: 140). In an embodiment, the subject experiences an improvement in the IWQOL or IWQOL-Lite Quality of Life score between about 10 to about 12 points relative to the IWQOL or IWQOL-Lite Quality of Life score of the subject prior to administration of the MC4R agonist (e.g., an MC4R agonist described herein, e.g., an MC4R agonist, e.g., SEQ ID NO: 140).

[0297] In an embodiment, the subject experiences an improvement in the IWQOL or IWQOL-Lite Quality of Life score between about 20 to about 40 points relative to the IWQOL or IWQOL-Lite Quality of Life score of the subject prior to administration of the MC4R agonist (e.g., an MC4R agonist described herein, e.g., an MC4R agonist, e.g., SEQ ID NO: 140). In an embodiment, the subject experiences an improvement in the IWQOL or IWQOL-Lite Quality of Life score between about 20 to about 35 points, 20 to about 30 points, or 20 to about 25 points relative to the IWQOL or IWQOL-Lite Quality of Life score of the subject prior to administration of the MC4R agonist (e.g., an MC4R agonist described herein, e.g., an MC4R agonist, e.g., SEQ ID NO: 140). In an embodiment, the subject experiences an improvement in the IWQOL or IWQOL-Lite Quality of Life score between about 20 to about 35 points relative to the IWQOL or IWQOL-Lite Quality of Life score of the subject prior to administration of the MC4R agonist (e.g., an MC4R agonist described herein, e.g., an MC4R agonist, e.g., SEQ ID NO: 140). In an embodiment, the subject experiences an improvement in the IWQOL or IWQOL-Lite Quality of Life score between about 20 to about 30 points relative to the IWQOL or IWQOL-Lite Quality of Life score of the subject prior to administration of the MC4R agonist (e.g., an MC4R agonist described herein, e.g., an MC4R agonist, e.g., SEQ ID NO: 140). In an embodiment, the subject experiences an improvement in the IWQOL or IWQOL-Lite Quality of Life score between about 20 to about 25 points relative to the IWQOL or IWQOL-Lite Quality of Life score of the subject prior to administration of the MC4R agonist (e.g., an MC4R agonist described herein, e.g., an MC4R agonist, e.g., SEQ ID NO: 140).

[0298] In an embodiment, the subject experiences an improvement in the IWQOL or IWQOL-Lite Quality of Life score between about 30 to about 40 points relative to the IWQOL or IWQOL-Lite Quality of Life score of the subject prior to administration of the MC4R agonist (e.g., an MC4R agonist described herein, e.g., an MC4R agonist, e.g., SEQ ID NO: 140). In an embodiment, the subject experiences an improvement in the IWQOL or IWQOL-Lite Quality of Life score between about 30 to about 35 points relative to the IWQOL or IWQOL-Lite Quality of Life score of the subject prior to administration of the MC4R agonist (e.g., an MC4R agonist described herein, e.g., an MC4R agonist, e.g., SEQ ID NO: 140).

[0299] In an embodiment, the subject experiences an improvement in the IWQOL or IWQOL-Lite Quality of Life score less than 40 points relative to the IWQOL or IWQOL-Lite Quality of Life score of the subject prior to the administration of the MC4R agonist (e.g., an MC4R agonist described herein, e.g., SEQ ID 140). In an embodiment, the subject experiences an improvement in the IWQOL or IWQOL-Lite Quality of Life score less than 35 points, 30 points, 25 points, 20 points, 18 points, 16 points, 14 points, 12 points, 10 points, 9 points, 8 points, 7 points, 6 points or less relative to the IWQOL or IWQOL-Lite Quality of Life score of the subject prior to the administration of the MC4R agonist (e.g., an MC4R agonist described herein, e.g., SEQ ID 140). In an embodiment, the subject experiences an improvement in the IWQOL or IWQOL-Lite Quality of Life score less than 35 points relative to the IWQOL or IWQOL-Lite Quality of Life score of the subject prior to the administration of the MC4R agonist (e.g., an MC4R agonist described herein, e.g., SEQ ID 140). In an embodiment, the subject experiences an improvement in the IWQOL or IWQOL-Lite Quality of Life score less than 30 points relative to the IWQOL or IWQOL-Lite Quality of Life score of the subject prior to the administration of the MC4R agonist (e.g., an MC4R agonist described herein, e.g., SEQ ID 140). In an embodiment, the subject experiences an improvement in the IWQOL or IWQOL-Lite Quality of Life score less than 25 points relative to the IWQOL or IWQOL-Lite Quality of Life score of the subject prior to the administration of the MC4R agonist (e.g., an MC4R agonist described herein, e.g., SEQ ID 140). In an embodiment, the subject experiences an improvement in the IWQOL or IWQOL-Lite Quality of Life score less than 20 points relative to the IWQOL or IWQOL-Lite Quality of Life score of the subject prior to the administration of the MC4R agonist (e.g., an MC4R agonist described herein, e.g., SEQ ID 140). In an embodiment, the subject experiences an improvement in the IWQOL or IWQOL-Lite Quality of Life score less than 18 points relative to the IWQOL or IWQOL-Lite Quality of Life score of the subject prior to the administration of the MC4R agonist (e.g., an MC4R agonist described herein, e.g., SEQ ID 140). In an embodiment, the subject experiences an improvement in the IWQOL or IWQOL-Lite Quality of Life score less than 16 points relative to the IWQOL or IWQOL-Lite Quality of Life score of the subject prior to the administration of the MC4R agonist (e.g., an MC4R agonist described herein, e.g., SEQ ID 140). In an embodiment, the subject experiences an improvement in the IWQOL or IWQOL-Lite Quality of Life score less than 14 points relative to the IWQOL or IWQOL-Lite Quality of Life score of the subject prior to the administration of the MC4R agonist (e.g., an MC4R agonist described herein, e.g., SEQ ID 140). In an embodiment, the subject experiences an improvement in the IWQOL or IWQOL-Lite Quality of Life score less than 12 points relative to the IWQOL or IWQOL-Lite Quality of Life score of the subject prior to the administration of the MC4R agonist (e.g., an MC4R agonist described herein, e.g., SEQ ID 140). In an embodiment, the subject experiences an improvement in the IWQOL or IWQOL-Lite Quality of Life score less than 10 points relative to the IWQOL or IWQOL-Lite Quality of Life score of the subject prior to the administration of the MC4R agonist (e.g., an MC4R agonist described herein, e.g., SEQ ID 140). In an embodiment, the subject experiences an improvement in the IWQOL or IWQOL-Lite Quality of Life score less than 9 points relative to the IWQOL or IWQOL-Lite Quality of Life score of the subject prior to the administration of the MC4R agonist (e.g., an MC4R agonist described herein, e.g., SEQ ID 140). In an embodiment, the subject experiences an improvement in the IWQOL or IWQOL-Lite Quality of Life score less than 8 points relative to the IWQOL or IWQOL-Lite Quality of Life score of the subject prior to the administration of the MC4R agonist (e.g., an MC4R agonist described herein, e.g., SEQ ID 140). In an embodiment, the subject experiences an improvement in the IWQOL or IWQOL-Lite Quality of Life score less than 7 points relative to the IWQOL or IWQOL-Lite Quality of Life score of the subject prior to the administration of the MC4R agonist (e.g., an MC4R agonist described herein, e.g., SEQ ID 140). In an embodiment, the subject experiences an improvement in the IWQOL or IWQOL-Lite Quality of Life score less than 6 points relative to the IWQOL or IWQOL-Lite Quality of Life score of the subject prior to the administration of the MC4R agonist (e.g., an MC4R agonist described herein, e.g., SEQ ID 140).

[0300] In embodiments, methods described herein result in a reduction in hunger level in the subject compared to a control (e.g., hunger level of the subject before treatment or a predetermined hunger level, e.g., average hunger level of an obese human population of like age and gender as the subject or the hunger level of the subject at a previous measurement, e.g., at a previous visit). In embodiments, the methods described herein result in abolishment of hunger in the subject.

[0301] In embodiments, hunger is measured by a scale, such as a Likert hunger scale, which ranges from 0 to 10 and is described herein. In embodiments, methods described herein result in a reduction in hunger score in the subject compared to a control (e.g., hunger level of the subject before treatment or a predetermined hunger level, e.g., average hunger level of an obese human population of like age and gender as the subject or the hunger level of the subject at a previous measurement, e.g., at a previous visit). In embodiments, methods described herein result in a lower score on the Likert hunger scale, e.g., a lower score by at least 1, 2, 3, 4, 5, 6, 7, 8, 9 or 10 points, compared to the control (e.g., hunger level of the subject before treatment or a predetermined hunger level, e.g., average hunger level of an obese human population of like age and gender as the subject or the hunger level of the subject at a previous measurement, e.g., at a previous visit). In embodiments, methods described herein result in a score of 0 on the Likert hunger scale after treatment.

[0302] In embodiments, the reduction in hunger level is measured/observed after 1 to 2 weeks of treatment or longer, 2-4 weeks of treatment or longer, 4-8 weeks of treatment or longer, or 8-16 weeks of treatment or longer.

[0303] REE is a measure of the basal metabolic rate of the subject and can be determined using methods such as those described in Chen et al. J. Clin. Endocrinol. Metab. 100.4 (2015):1639-45. In embodiments, the REE can be determined by placing the subject in a whole-room indirect calorimeter (also called a metabolic chamber) at a certain time after treatment (e.g., after 3, 4, 5, 6, 7 days, or 1, 2, 3, 4, or more weeks). In embodiments, the REE is measured in 30-minute measurements periods, and in some cases, REE values from several 30-minute periods are averaged to generate an average REE. In embodiments, the REE can be determined after a 10-12 hour fasting period, at thermoneutrality (e.g., around 25 deg C), where the subject is awake without psychological or physical stress. In embodiments, REE is measured in units of energy per unit time (e.g., kcal/h or kcal/day). In embodiments, the REE is measured relative to kg lean body mass in a subject (e.g., REE/kg lean mass), e.g., as described in the Examples.

[0304] In embodiments, methods described herein result in no change or no decrease in energy expenditure, e.g., resting energy expenditure (REE), in the subject over an hourly, daily (e.g., in 24 hours), weekly (e.g., in 7 days), or monthly (e.g., in 30 days) period compared to a control REE (e.g., the REE in the subject prior to treatment or a predetermined REE, e.g., average REE of an obese human population of like age and gender and normalized for weight as the subject or the REE of the subject at a previous measurement, e.g., previous visit), e.g., as measured after 3, 4, 5, 6, 7 days, or 1, 2, 3, 4, or more weeks of treatment.

[0305] In embodiments, methods described herein result in no detectable change or no detectable decrease in energy expenditure, e.g., resting energy expenditure (REE) per kg lean body mass, in the subject over an hourly, daily (e.g., in 24 hours), weekly (e.g., in 7 days), or monthly (e.g., in 30 days) period compared to the control REE (e.g., the REE in the subject prior to treatment or a predetermined REE, e.g., average REE of an obese human population of like age and gender as the subject or the REE of the subject at a previous measurement, e.g., previous visit), e.g., as measured after 3, 4, 5, 6, 7 days, or 1, 2, 3, 4, or more weeks of treatment.

[0306] In embodiments, methods described herein result in an increase in energy expenditure, e.g., resting energy expenditure (REE), in the subject over a hourly, daily (e.g., in 24 hours), weekly (e.g., in 7 days), or monthly (e.g., in 30 days) period compared to a control REE (e.g., the REE in the subject prior to treatment or a predetermined REE, e.g., average REE of an obese human population of like age and gender and normalized for weight as the subject or the REE of the subject at a previous measurement, e.g., previous visit), e.g., as measured after 3, 4, 5, 6, 7 days, or 1, 2, 3, 4, or more weeks of treatment.

[0307] In embodiments, the increase in REE in the subject is at least 20 kcal/day (e.g., at least 20, 30, 40, 50, 60, 70, 80, 90, 100, 110, 120, 130, 140, 150 kcal/day or more), e.g., as measured after 3, 4, 5, 6, 7 days, or 1, 2, 3, 4, or more weeks of treatment.

[0308] In embodiments, the increase in REE in the subject is at least 2% (e.g., at least 2%, 3%, 4%, 5%, 6%, 7%, 8%, 9%, 10%, 11%, 12%, 13%, 14%, 15% or more), e.g., as measured after 3, 4, 5, 6, 7 days, or 1, 2, 3, 4, or more weeks of treatment, compared to the REE in the subject prior to treatment.

[0309] In embodiments, the REE in the subject (e.g., adult subject) after treatment with a MC4R agonist (e.g., after 3, 4, 5, 6, 7 days, or 1, 2, 3, 4, or more weeks of treatment) is at least 1800 kcal/day (e.g., at least 1800, 1825, 1850, 1875, 1900, 1925, 1950, 1975, 2000, 2025, 2050, 2100, 2150, 2200, 2250, 2300, 2400 kcal/day, or more), e.g., for an adult subject. In embodiments, the REE in the subject (e.g., pediatric subject) after treatment with a MC4R agonist (e.g., after 3, 4, 5, 6, 7 days, or 1, 2, 3, 4, or more weeks of treatment) is at least 200 kcal/day (e.g., at least 200, 225, 250, 275, 300, 325, 350, 375, 400, 450, 500 kcal/day or more), e.g., for pediatric patients.

[0310] In embodiments, methods described herein result in a reduction in food intake by the subject compared to a control (e.g., the food intake of the subject prior to treatment or a predetermined food intake level, e.g., the food intake of an average human obese population or the food intake of the subject at a previous measurement, e.g., at a previous visit), e.g., where the food intake is measured as daily food intake or food intake over a period of 24 hours, or one week. In embodiments, the reduction is at least 100 kilocalories, e.g., at least 100, 125, 150, 175, 200, 225, 250, 275, 300, 325, 350, 375, 400, 425, 450, 475, 500, 525, 550, 575, 600, 1000 kilocalories or more, e.g., for daily food intake or food intake over a period of 24 hours, or one week, or 30 days or for longer time periods, e.g., for an adult subject. In embodiments, mean food intake can decrease from a baseline at or above about 100 kcal/kg/day to about 90, 80, 70, 60, 50, 40, 30, 20 or 10 kcal/kg/day or lower after treatment with a MC4R agonist, e.g., setmelanotide, e.g., in a pediatric subject at about 1 year of age. In embodiments, mean food intake can decrease from a baseline at or above about 40 kcal/kg/day to about 35, 30, 20 or 10 kcal/kg/day or lower after treatment with a MC4R agonist, e.g., setmelanotide, e.g., in a pediatric subject in late adolescence.

[0311] Food intake can be determined by standard methods, e.g., as described in Rutishauser. Pub. Health Nutr. 8.7A(2005):1100-07.

[0312] In embodiments, methods described herein result in a reduction in waist circumference of the subject compared to a control (e.g., the waist circumference of the subject prior to treatment or the waist circumference of the subject at a previous measurement, e.g., previous visit), as measured 1, 2, 3, 4, 5, 6, 7, 8, 9, 10 weeks or more after initiation of treatment.

[0313] In embodiments, the reduction in waist circumference is at least 2 cm (e.g., at least 2, 3, 4, 5, 6, 7, 8, 9, 10 cm or more) in the subject (e.g., adult subject) compared to a control (e.g., the waist circumference of the subject prior to treatment or a predetermined waist circumference, e.g., the waist circumference of an average obese human population of like age and gender or the waist circumference of the subject at a previous measurement, e.g., previous visit), as measured 1, 2, 3, 4, 5, 6, 7, 8, 9, 10 weeks or more after initiation of treatment.

[0314] In embodiments, the waist circumference is measured using standard methods. In embodiments, the waist circumference is the largest circumference around a subject's midsection, e.g., around a subject's abdomen. In other embodiments, the waist circumference is measured around the natural waist (e.g., in between the lowest rib and the top of the hip bone), the umbilicus, or at the narrowest point of the midsection.

[0315] A subject may experience a reduction in waist circumference upon administration of the MC4R agonist (e.g., an MC4R agonist described herein, e.g., SEQ ID NO: 140). For example, the subject may experience a reduction in waist circumference of greater than 1 cm upon administration of the MC4R agonist (e.g., an MC4R agonist described herein, e.g., SEQ ID NO: 140) relative to the waist circumference of the subject prior to administration of the agonist (e.g., an MC4R agonist described herein, e.g., SEQ ID 140). In an embodiment, the subject experiences a reduction in waist circumference of greater than 1.5, 2, 2.5 3, 4, 5, 6, 7, 8, 9, 10 cm or more relative to the waist circumference of the subject prior to administration of the MC4R agonist (e.g., an MC4R agonist described herein, e.g., SEQ ID NO: 140). In an embodiment, the subject experiences a reduction in waist circumference of greater than 1.5 cm relative to the waist circumference of the subject prior to administration of the MC4R agonist (e.g., an MC4R agonist described herein, e.g., SEQ ID NO: 140). In an embodiment, the subject experiences a reduction in waist circumference of greater than 2 cm relative to the waist circumference of the subject prior to administration of the MC4R agonist (e.g., an MC4R agonist described herein, e.g., SEQ ID NO: 140). In an embodiment, the subject experiences a reduction in waist circumference of greater than 2.5 cm relative to the waist circumference of the subject prior to administration of the MC4R agonist (e.g., an MC4R agonist described herein, e.g., SEQ ID NO: 140). In an embodiment, the subject experiences a reduction in waist circumference of greater than 3 cm relative to the waist circumference of the subject prior to administration of the MC4R agonist (e.g., an MC4R agonist described herein, e.g., SEQ ID NO: 140). In an embodiment, the subject experiences a reduction in waist circumference of greater than 4 cm relative to the waist circumference of the subject prior to administration of the MC4R agonist (e.g., an MC4R agonist described herein, e.g., SEQ ID NO: 140). In an embodiment, the subject experiences a reduction in waist circumference of greater than 5 cm relative to the waist circumference of the subject prior to administration of the MC4R agonist (e.g., an MC4R agonist described herein, e.g., SEQ ID NO: 140). In an embodiment, the subject experiences a reduction in waist circumference of greater than 6 cm relative to the waist circumference of the subject prior to administration of the MC4R agonist (e.g., an MC4R agonist described herein, e.g., SEQ ID NO: 140). In an embodiment, the subject experiences a reduction in waist circumference of greater than 7 cm relative to the waist circumference of the subject prior to administration of the MC4R agonist (e.g., an MC4R agonist described herein, e.g., SEQ ID NO: 140). In an embodiment, the subject experiences a reduction in waist circumference of greater than 8 cm relative to the waist circumference of the subject prior to administration of the MC4R agonist (e.g., an MC4R agonist described herein, e.g., SEQ ID NO: 140). In an embodiment, the subject experiences a reduction in waist circumference of greater than 9 cm relative to the waist circumference of the subject prior to administration of the MC4R agonist (e.g., an MC4R agonist described herein, e.g., SEQ ID NO: 140). In an embodiment, the subject experiences a reduction in waist circumference of greater than 10 cm relative to the waist circumference of the subject prior to administration of the MC4R agonist (e.g., an MC4R agonist described herein, e.g., SEQ ID NO: 140).

[0316] In an embodiment, the subject experiences a reduction in waist circumference of greater than 10″ relative to the waist circumference of the subject prior to administration of the MC4R agonist (e.g., an MC4R agonist described herein, e.g., SEQ ID NO: 140).

[0317] In an embodiment, the subject experiences a reduction in waist circumference between about 1 to about 10 cm relative to the waist circumference of the subject prior to administration of the MC4R agonist (e.g., an MC4R agonist described herein, e.g., SEQ ID NO: 140). In an embodiment, the subject experiences a reduction in waist circumference between about 1 to about 9 cm, 1 to about 8 cm, 1 to about 7 cm, 1 to about 6 cm, 1 to about 5 cm, 1 to about 4 cm, 1 to about 3 cm, or 1 to about 2 cm relative to the waist circumference of the subject prior to administration of the MC4R agonist (e.g., an MC4R agonist described herein, e.g., SEQ ID NO: 140). In an embodiment, the subject experiences a reduction in waist circumference between about 1 to about 9 cm relative to the waist circumference of the subject prior to administration of the MC4R agonist (e.g., an MC4R agonist described herein, e.g., SEQ ID NO: 140). In an embodiment, the subject experiences a reduction in waist circumference between about 1 to about 8 cm relative to the waist circumference of the subject prior to administration of the MC4R agonist (e.g., an MC4R agonist described herein, e.g., SEQ ID NO: 140). In an embodiment, the subject experiences a reduction in waist circumference between about 1 to about 7 cm relative to the waist circumference of the subject prior to administration of the MC4R agonist (e.g., an MC4R agonist described herein, e.g., SEQ ID NO: 140). In an embodiment, the subject experiences a reduction in waist circumference between about 1 to about 6 cm relative to the waist circumference of the subject prior to administration of the MC4R agonist (e.g., an MC4R agonist described herein, e.g., SEQ ID NO: 140). In an embodiment, the subject experiences a reduction in waist circumference between about 1 to about 5 cm relative to the waist circumference of the subject prior to administration of the MC4R agonist (e.g., an MC4R agonist described herein, e.g., SEQ ID NO: 140). In an embodiment, the subject experiences a reduction in waist circumference between about 1 to about 4 cm relative to the waist circumference of the subject prior to administration of the MC4R agonist (e.g., an MC4R agonist described herein, e.g., SEQ ID NO: 140). In an embodiment, the subject experiences a reduction in waist circumference between about 1 to about 3 cm relative to the waist circumference of the subject prior to administration of the MC4R agonist (e.g., an MC4R agonist described herein, e.g., SEQ ID NO: 140). In an embodiment, the subject experiences a reduction in waist circumference between about 1 to about 2 cm relative to the waist circumference of the subject prior to administration of the MC4R agonist (e.g., an MC4R agonist described herein, e.g., SEQ ID NO: 140).

[0318] In an embodiment, the subject experiences a reduction in waist circumference between about 2 to about 10 cm relative to the waist circumference of the subject prior to administration of the MC4R agonist (e.g., an MC4R agonist described herein, e.g., SEQ ID NO: 140). In an embodiment, the subject experiences a reduction in waist circumference between about 2 to about 9 cm, 2 to about 8 cm, 2 to about 7 cm, 2 to about 6 cm, 2 to about 5 cm, 2 to about 4 cm, or 2 to about 3 cm relative to the waist circumference of the subject prior to administration of the MC4R agonist (e.g., an MC4R agonist described herein, e.g., SEQ ID NO: 140). In an embodiment, the subject experiences a reduction in waist circumference between about 2 to about 9 cm relative to the waist circumference of the subject prior to administration of the MC4R agonist (e.g., an MC4R agonist described herein, e.g., SEQ ID NO: 140). In an embodiment, the subject experiences a reduction in waist circumference between about 2 to about 8 cm relative to the waist circumference of the subject prior to administration of the MC4R agonist (e.g., an MC4R agonist described herein, e.g., SEQ ID NO: 140). In an embodiment, the subject experiences a reduction in waist circumference between about 2 to about 7 cm relative to the waist circumference of the subject prior to administration of the MC4R agonist (e.g., an MC4R agonist described herein, e.g., SEQ ID NO: 140). In an embodiment, the subject experiences a reduction in waist circumference between about 2 to about 6 cm relative to the waist circumference of the subject prior to administration of the MC4R agonist (e.g., an MC4R agonist described herein, e.g., SEQ ID NO: 140). In an embodiment, the subject experiences a reduction in waist circumference between about 2 to about 5 cm relative to the waist circumference of the subject prior to administration of the MC4R agonist (e.g., an MC4R agonist described herein, e.g., SEQ ID NO: 140). In an embodiment, the subject experiences a reduction in waist circumference between about 2 to about 4 cm relative to the waist circumference of the subject prior to administration of the MC4R agonist (e.g., an MC4R agonist described herein, e.g., SEQ ID NO: 140). In an embodiment, the subject experiences a reduction in waist circumference between about 2 to about 3 cm relative to the waist circumference of the subject prior to administration of the MC4R agonist (e.g., an MC4R agonist described herein, e.g., SEQ ID NO: 140).

[0319] In an embodiment, the subject experiences a reduction in waist circumference between about 3 to about 10 cm relative to the waist circumference of the subject prior to administration of the MC4R agonist (e.g., an MC4R agonist described herein, e.g., SEQ ID NO: 140). In an embodiment, the subject experiences a reduction in waist circumference between about 3 to about 9 cm, 3 to about 8 cm, 3 to about 7 cm, 3 to about 6 cm, 3 to about 5 cm, or 3 to about 4 cm relative to the waist circumference of the subject prior to administration of the MC4R agonist (e.g., an MC4R agonist described herein, e.g., SEQ ID NO: 140). In an embodiment, the subject experiences a reduction in waist circumference between about 3 to about 9 cm relative to the waist circumference of the subject prior to administration of the MC4R agonist (e.g., an MC4R agonist described herein, e.g., SEQ ID NO: 140). In an embodiment, the subject experiences a reduction in waist circumference between about 3 to about 8 cm relative to the waist circumference of the subject prior to administration of the MC4R agonist (e.g., an MC4R agonist described herein, e.g., SEQ ID NO: 140). In an embodiment, the subject experiences a reduction in waist circumference between about 3 to about 7 cm relative to the waist circumference of the subject prior to administration of the MC4R agonist (e.g., an MC4R agonist described herein, e.g., SEQ ID NO: 140). In an embodiment, the subject experiences a reduction in waist circumference between about 3 to about 6 cm relative to the waist circumference of the subject prior to administration of the MC4R agonist (e.g., an MC4R agonist described herein, e.g., SEQ ID NO: 140). In an embodiment, the subject experiences a reduction in waist circumference between about 3 to about 5 cm relative to the waist circumference of the subject prior to administration of the MC4R agonist (e.g., an MC4R agonist described herein, e.g., SEQ ID NO: 140). In an embodiment, the subject experiences a reduction in waist circumference between about 3 to about 4 cm relative to the waist circumference of the subject prior to administration of the MC4R agonist (e.g., an MC4R agonist described herein, e.g., SEQ ID NO: 140).

[0320] In an embodiment, the subject experiences a reduction in waist circumference between about 4 to about 10 cm relative to the waist circumference of the subject prior to administration of the MC4R agonist (e.g., an MC4R agonist described herein, e.g., SEQ ID NO: 140). In an embodiment, the subject experiences a reduction in waist circumference between about 4 to about 9 cm, 4 to about 8 cm, 4 to about 7 cm, 4 to about 6 cm, or 4 to about 5 cm relative to the waist circumference of the subject prior to administration of the MC4R agonist (e.g., an MC4R agonist described herein, e.g., SEQ ID NO: 140). In an embodiment, the subject experiences a reduction in waist circumference between about 4 to about 9 cm relative to the waist circumference of the subject prior to administration of the MC4R agonist (e.g., an MC4R agonist described herein, e.g., SEQ ID NO: 140). In an embodiment, the subject experiences a reduction in waist circumference between about 4 to about 8 cm relative to the waist circumference of the subject prior to administration of the MC4R agonist (e.g., an MC4R agonist described herein, e.g., SEQ ID NO: 140). In an embodiment, the subject experiences a reduction in waist circumference between about 4 to about 7 cm relative to the waist circumference of the subject prior to administration of the MC4R agonist (e.g., an MC4R agonist described herein, e.g., SEQ ID NO: 140). In an embodiment, the subject experiences a reduction in waist circumference between about 4 to about 6 cm relative to the waist circumference of the subject prior to administration of the MC4R agonist (e.g., an MC4R agonist described herein, e.g., SEQ ID NO: 140). In an embodiment, the subject experiences a reduction in waist circumference between about 4 to about 5 cm relative to the waist circumference of the subject prior to administration of the MC4R agonist (e.g., an MC4R agonist described herein, e.g., SEQ ID NO: 140).

[0321] In an embodiment, the subject experiences a reduction in waist circumference between about 5 to about 10 cm relative to the waist circumference of the subject prior to administration of the MC4R agonist (e.g., an MC4R agonist described herein, e.g., SEQ ID NO: 140). In an embodiment, the subject experiences a reduction in waist circumference between about 5 to about 9 cm, 5 to about 8 cm, 5 to about 7 cm, or 5 to about 6 cm, relative to the waist circumference of the subject prior to administration of the MC4R agonist (e.g., an MC4R agonist described herein, e.g., SEQ ID NO: 140). In an embodiment, the subject experiences a reduction in waist circumference between about 5 to about 9 cm relative to the waist circumference of the subject prior to administration of the MC4R agonist (e.g., an MC4R agonist described herein, e.g., SEQ ID NO: 140). In an embodiment, the subject experiences a reduction in waist circumference between about 5 to about 8 cm relative to the waist circumference of the subject prior to administration of the MC4R agonist (e.g., an MC4R agonist described herein, e.g., SEQ ID NO: 140). In an embodiment, the subject experiences a reduction in waist circumference between about 5 to about 7 cm relative to the waist circumference of the subject prior to administration of the MC4R agonist (e.g., an MC4R agonist described herein, e.g., SEQ ID NO: 140). In an embodiment, the subject experiences a reduction in waist circumference between about 5 to about 6 cm relative to the waist circumference of the subject prior to administration of the MC4R agonist (e.g., an MC4R agonist described herein, e.g., SEQ ID NO: 140).

[0322] In an embodiment, the subject experiences a reduction in waist circumference between about 6 to about 10 cm relative to the waist circumference of the subject prior to administration of the MC4R agonist (e.g., an MC4R agonist described herein, e.g., SEQ ID NO: 140). In an embodiment, the subject experiences a reduction in waist circumference between about 6 to about 9 cm, 6 to about 8 cm, or 6 to about 7 cm relative to the waist circumference of the subject prior to administration of the MC4R agonist (e.g., an MC4R agonist described herein, e.g., SEQ ID NO: 140). In an embodiment, the subject experiences a reduction in waist circumference between about 6 to about 9 cm relative to the waist circumference of the subject prior to administration of the MC4R agonist (e.g., an MC4R agonist described herein, e.g., SEQ ID NO: 140). In an embodiment, the subject experiences a reduction in waist circumference between about 6 to about 8 cm relative to the waist circumference of the subject prior to administration of the MC4R agonist (e.g., an MC4R agonist described herein, e.g., SEQ ID NO: 140). In an embodiment, the subject experiences a reduction in waist circumference between about 6 to about 7 cm relative to the waist circumference of the subject prior to administration of the MC4R agonist (e.g., an MC4R agonist described herein, e.g., SEQ ID NO: 140).

[0323] In an embodiment, the subject experiences a reduction in waist circumference between about 7 to about 10 cm relative to the waist circumference of the subject prior to administration of the MC4R agonist (e.g., an MC4R agonist described herein, e.g., SEQ ID NO: 140). In an embodiment, the subject experiences a reduction in waist circumference between about 7 to about 9 cm or about 7 to about 8 cm relative to the waist circumference of the subject prior to administration of the MC4R agonist (e.g., an MC4R agonist described herein, e.g., SEQ ID NO: 140). In an embodiment, the subject experiences a reduction in waist circumference between about 7 to about 9 cm relative to the waist circumference of the subject prior to administration of the MC4R agonist (e.g., an MC4R agonist described herein, e.g., SEQ ID NO: 140). In an embodiment, the subject experiences a reduction in waist circumference between about 7 to about 8 cm relative to the waist circumference of the subject prior to administration of the MC4R agonist (e.g., an MC4R agonist described herein, e.g., SEQ ID NO: 140).

[0324] In an embodiment, the subject experiences a reduction in waist circumference between about 8 to about 10 cm relative to the waist circumference of the subject prior to administration of the MC4R agonist (e.g., an MC4R agonist described herein, e.g., SEQ ID NO: 140). In an embodiment, the subject experiences a reduction in waist circumference between about 8 to about 9 cm relative to the waist circumference of the subject prior to administration of the MC4R agonist (e.g., an MC4R agonist described herein, e.g., SEQ ID NO: 140).

[0325] In an embodiment, the subject experiences a reduction in waist circumference between about 9 to about 10 cm relative to the waist circumference of the subject prior to administration of the MC4R agonist (e.g., an MC4R agonist described herein, e.g., SEQ ID NO: 140).

[0326] In an embodiment, the subject experiences a reduction in waist circumference of less than 10″ relative to the waist circumference of the subject prior to administration of the MC4R agonist (e.g., an MC4R agonist described herein, e.g., SEQ ID NO: 140). In an embodiment, the subject experiences a reduction in waist circumference of less than 9, 8, 7, 6, 5, 4, 3, 2.5, 2, 1.5, 1 cm or less relative to the waist circumference of the subject prior to administration of the MC4R agonist (e.g., an MC4R agonist described herein, e.g., SEQ ID NO: 140). In an embodiment, the subject experiences a reduction in waist circumference of less than 9 cm relative to the waist circumference of the subject prior to administration of the MC4R agonist (e.g., an MC4R agonist described herein, e.g., SEQ ID NO: 140). the subject experiences a reduction in waist circumference of less than 8 cm relative to the waist circumference of the subject prior to administration of the MC4R agonist (e.g., an MC4R agonist described herein, e.g., SEQ ID NO: 140). the subject experiences a reduction in waist circumference of less than 7 cm relative to the waist circumference of the subject prior to administration of the MC4R agonist (e.g., an MC4R agonist described herein, e.g., SEQ ID NO: 140). the subject experiences a reduction in waist circumference of less than 6 cm relative to the waist circumference of the subject prior to administration of the MC4R agonist (e.g., an MC4R agonist described herein, e.g., SEQ ID NO: 140). the subject experiences a reduction in waist circumference of less than 5 cm relative to the waist circumference of the subject prior to administration of the MC4R agonist (e.g., an MC4R agonist described herein, e.g., SEQ ID NO: 140). the subject experiences a reduction in waist circumference of less than 4 cm relative to the waist circumference of the subject prior to administration of the MC4R agonist (e.g., an MC4R agonist described herein, e.g., SEQ ID NO: 140). the subject experiences a reduction in waist circumference of less than 3 cm relative to the waist circumference of the subject prior to administration of the MC4R agonist (e.g., an MC4R agonist described herein, e.g., SEQ ID NO: 140). the subject experiences a reduction in waist circumference of less than 2.5 cm relative to the waist circumference of the subject prior to administration of the MC4R agonist (e.g., an MC4R agonist described herein, e.g., SEQ ID NO: 140). the subject experiences a reduction in waist circumference of less than 2 cm relative to the waist circumference of the subject prior to administration of the MC4R agonist (e.g., an MC4R agonist described herein, e.g., SEQ ID NO: 140). the subject experiences a reduction in waist circumference of less than 1.5 cm relative to the waist circumference of the subject prior to administration of the MC4R agonist (e.g., an MC4R agonist described herein, e.g., SEQ ID NO: 140). the subject experiences a reduction in waist circumference of less than 1 cm relative to the waist circumference of the subject prior to administration of the MC4R agonist (e.g., an MC4R agonist described herein, e.g., SEQ ID NO: 140).

[0327] In embodiments, methods described herein result in no detectable increase in blood pressure (e.g., diastolic and/or systolic blood pressure) of the subject compared to a control blood pressure (e.g., the blood pressure of the subject prior to treatment or a predetermined blood pressure, e.g., the blood pressure of an average obese human population of like age and gender or the blood pressure of the subject at a previous measurement, e.g., previous visit), as measured 1, 2, 3, 4, 5, 6, 7, 8, 9, 10 weeks or more after initiation of treatment.

[0328] In embodiments, methods described herein result in a reduction in blood pressure (e.g., diastolic and/or systolic blood pressure) of the subject a control blood pressure (e.g., the blood pressure of the subject prior to treatment or a predetermined blood pressure, e.g., the blood pressure of an average obese human population of like age and gender or the blood pressure of the subject at a previous measurement, e.g., previous visit), as measured 1, 2, 3, 4, 5, 6, 7, 8, 9, 10 weeks or more after initiation of treatment.

[0329] In embodiments, the reduction in blood pressure, e.g., systolic blood pressure, is at least 3 mmHg (e.g., at least 3, 3.5, 4, 4.5, 5, 5.5, 6, 6.5, 7 mmHg or more) compared to the blood pressure of the subject prior to treatment, as measured 1, 2, 3, 4, 5, 6, 7, 8, 9, 10 weeks or more after initiation of treatment.

[0330] In embodiments, the reduction in blood pressure, e.g., diastolic blood pressure, is at least 4 mmHg (e.g., at least 4, 7, 7.5, 8, 8.5, 9, 9.5, 10 mmHg or more) compared to the blood pressure of the subject prior to treatment, as measured 1, 2, 3, 4, 5, 6, 7, 8, 9, 10 weeks or more after initiation of treatment.

[0331] In embodiments, the methods described herein do not result in an adverse effect on heart rate or blood pressure.

[0332] In an embodiment, the present disclosure provides a method for treating obesity, e.g., hypothalamic obesity, in a subject, wherein the method comprises administering to the subject a compound of Formula I (e.g., Formula (I), (I-a), (I-b), (I-c), and (I-d)) or Formula XII (e.g., Formula (XII) (Formula (XII), (XII-a), (XII-b), (XII-c), and (XII-d)), wherein upon administration of Formula I or Formula XII, the subject experiences one or more of:
[0333] (i) a BMI reduction ≥5% after 16 weeks from baseline for all subjects
[0334] (ii) A mean reduction in BMI≥10% after 16 weeks from baseline for a subject completing the course of therapy
[0335] (iii) a mean reduction in BMI of about 6.36 after 16 weeks from baseline
[0336] (iv) a mean reduction in BMI of about 7.16 after 16 weeks from baseline, wherein the subject is a pediatric patient from 6 to less than 18 years of age
[0337] (v) a mean reduction in BMI of about 2.75 after 16 weeks from baseline, wherein the subject an is adult subject
[0338] (vi) a mean percentage reduction in BMI of about 17.18% after 16 weeks from baseline
[0339] (vii) A mean reduction in BMI Z-Score of about 1.08 after 16 weeks from baseline
[0340] (viii) A mean reduction in weight of about 15.87 kg after 16 weeks from baseline
[0341] (ix) A mean reduction in weight of about 17.83 kg after 16 weeks from baseline, wherein the subject is a pediatric patient from 6 to less than 18 years of age
[0342] (x) A mean reduction in weight of 7.02 kg after 16 weeks from baseline, wherein the subject is an adult patient
[0343] (xi) A mean percentage reduction in weight of 15.79% after 16 weeks from baseline
[0344] (xii) A mean percentage reduction in weight of 17.80% after 16 weeks from baseline, wherein the subject is a pediatric patient from 6 to less than 18 years of age
[0345] (xiii) A mean percentage reduction in weight of 6.76% after 16 weeks from baseline, wherein the subject is an adult subject
[0346] (xiv) A mean reduction in the weekly average of the daily most hunger score of 2.66 after 16 weeks from baseline

[0347] In yet another embodiment, the present disclosure provides a method for treating obesity, e.g., hypothalamic obesity, in a subject, wherein the method comprises administering to the subject a compound of Formula I (e.g., Formula (I), (I-a), (I-b), (I-c), and (I-e)) or Formula XII (e.g., Formula (XII) (Formula (XII), (XII-a), (XII-b), (XII-c), and (XII-d)), wherein upon administration of Formula I or Formula XII, the subject experiences one or more of:
[0348] (xvi) a BMI reduction ≥5% after 16 weeks from baseline for all subjects
[0349] (xvii) A mean reduction in BMI≥10% after 16 weeks from baseline for a subject completing the course of therapy
[0350] (xviii) a mean reduction in BMI of about 5.32 after 16 weeks from baseline
[0351] (xxi) a mean percentage reduction in BMI of about 14.46% after 16 weeks from baseline
[0352] (xxii) A mean reduction in the weekly average of the daily most hunger score of 2.77 after 16 weeks from baseline

[0353] In an embodiment, the present disclosure provides a method for treating obesity, e.g., hypothalamic obesity, in a subject, wherein the method comprises administering to the subject a compound of Formula I (e.g., Formula (I), (I-a), (I-b), (I-c), and (I-d)) or Formula XII (e.g., Formula (XII) (Formula (XII), (XII-a), (XII-b), (XII-c), and (XII-d)), wherein upon administration of Formula I or Formula XII, the subject experiences all of (i)-(xiv).

[0354] In an embodiment, the present disclosure provides a method for treating obesity, e.g., hypothalamic obesity, in a subject, wherein the method comprises administering to the subject a compound of Formula I (e.g., Formula (I), (I-a), (I-b), (I-c), and (I-d)) or Formula XII (e.g., Formula (XII) (Formula (XII), (XII-a), (XII-b), (XII-c), and (XII-d)), wherein upon administration of Formula I or Formula XII, the subject experiences all of (xvi)-(xii).

[0355] In an embodiment, the present disclosure provides a method for treating obesity, e.g., hypothalamic obesity, in a subject, wherein the method comprises administering to the subject a compound of Formula I (e.g., Formula (I), (I-a), (I-b), (I-c), and (I-d)) or Formula XII (e.g., Formula (XII) (Formula (XII), (XII-a), (XII-b), (XII-c), and (XII-d)), wherein upon administration of Formula I or Formula XII, the subject experiences all of (i)-(xxii).

[0356] In an embodiment, the present disclosure provides a method for treating obesity, e.g., hypothalamic obesity, in a subject, wherein the method comprises administering to the subject a compound of Formula I (e.g., Formula (I), (I-a), (I-b), (I-c), and (I-d)) or Formula XII (e.g., Formula (XII) (Formula (XII), (XII-a), (XII-b), (XII-c), and (XII-d)), wherein upon administration of Formula I or Formula XII, the subject experiences one or more of (iv), (vii), (ix), (xii).

[0357] In an embodiment, the present disclosure provides a method for treating obesity, e.g., hypothalamic obesity, in a subject, wherein the method comprises administering to the subject a compound of Formula I (e.g., Formula (I), (I-a), (I-b), (I-c), and (I-d)) or Formula XII (e.g., Formula (XII) (Formula (XII), (XII-a), (XII-b), (XII-c), and (XII-d)), wherein upon administration of Formula I or Formula XII, the subject experiences all of (iv), (vii), (ix), (xii).

[0358] In an embodiment, the present disclosure provides a method for treating obesity, e.g., hypothalamic obesity, in a subject, wherein the method comprises administering to the subject a compound of Formula I (e.g., Formula (I), (I-a), (I-b), (I-c), and (I-d)) or Formula XII (e.g., Formula (XII) (Formula (XII), (XII-a), (XII-b), (XII-c), and (XII-d)), wherein upon administration of Formula I or Formula XII, the subject experiences one or more of (v), (x) and (xiii).

[0359] In an embodiment, the present disclosure provides a method for treating obesity, e.g., hypothalamic obesity, in a subject, wherein the method comprises administering to the subject a compound of Formula I (e.g., Formula (I), (I-a), (I-b), (I-c), and (I-e)) or Formula XII (e.g., Formula (XII) (Formula (XII), (XII-a), (XII-b), (XII-c), and (XII-d)), wherein upon administration of Formula I or Formula XII, the subject experiences all of (v), (x) and (xiii).

### Patient Selection

[0360] In accordance with any method described herein, in certain embodiments, the subject is obese, e.g., prior to administration of an MC4R agonist described herein, e.g., at the time the MC4R agonist is prescribed, or at the time of the first administration of the MC4R agonist. In embodiments, the subject is a severely obese, pediatric or adult patient e.g., prior to administration of an MC4R agonist described herein, e.g., at the time the MC4R agonist is prescribed or at the time of the first administration of the MC4R agonist. In embodiments, the subject is hyperphagic, e.g., prior to administration of an MC4R agonist described herein, e.g., at the time the MC4R agonist is prescribed, or at the time of the first administration of the MC4R agonist.

[0361] In embodiments, the subject (e.g., adult subject) has a body mass index (BMI) greater than 25 kg/m² or 30 kg/m² (e.g., ≥25, 26, 27, 28, 29, 30, 31, 32, 33, 34, 35, 36, 37, 38, 39, 40, 41, 42, 43, 44, 45, 46, 47, 48, 49, 50 kg/m² or greater) prior to administration of the MC4R agonist, e.g., at the time the MC4R agonist is prescribed, or at the time of the first administration.

[0362] In embodiments, the subject (e.g., pediatric subject) has a body mass index (BMI) higher than 85-95 percentile prior to administration of the MC4R agonist, e.g., at the time the MC4R agonist is prescribed, or at the time of the first administration.

[0363] In embodiments, the subject has a body weight of at least about 5 kg, e.g., at least about 5 kg, 10 kg, 20 kg, 30, 40, 50, 60, 70, 80, 90, 100, 110, 120, 130, 140,145, 150, 155, 160, 165, 170, 175, 180, 185, 190, 200, 205, 210, 215, 220 kg or greater, e.g., prior to administration of the MC4R agonist, e.g., at the time the MC4R agonist is prescribed, or at the time of the first administration. In embodiments, the subject has a body weight of a least 20 kg, at least 60 kg, or at least 100 kg, e.g., prior to administration of the MC4R agonist, e.g., at the time the MC4R agonist is prescribed, or at the time of the first administration.

[0364] In embodiments, the subject has received intervention in the gastrointestinal system. For example, the subject may have received a gallbladder surgery, an intestinal surgery, a gastric surgery (e.g., a bariatric surgery), or other survival procedure. In an embodiment, the subject has received a gastric bypass surgery. In an embodiment, the subject has received a surgery resulting in a restriction of the total amount of food capable of being held or processed at one time, e.g., the stomach, small intestine, large intestine, or colon.

[0365] In an embodiment, the subject has undergone a surgery, e.g., a tumor resection surgery.

[0366] In an embodiment, the subject has a proliferative brain disease. The proliferative brain disease may include a benign tumor, benign lesion, or a malignant tumor, e.g., cancer. In an embodiment, the proliferative brain disease is present in the hypothalamus. In an embodiment, the proliferative brain disease is present in the paraventricular hypothalamic nucleus, ventromedial hypothalamic nucleus, or arcuate hypothalamic nucleus.

[0367] In an embodiment, the proliferative brain disease is a benign brain tumor or benign brain lesion. Exemplary types of benign tumors or brain lesions include a meningioma, pituitary adenoma, craniopharyngioma, Schwannoma, nasopharyngeal angiofibroma, choroid plexus tumor, dysembryoplastic neuroepithelial tumor, neurofibroma, hemangioblastoma, chondroma, giant cell tumor, osteoma, arachnoid cyst, colloid cyst, dermoid cyst, epidermoid cyst, fibrous dysplasia, Rathke's cleft cyst, and petrous apex lesion. In an embodiment, the proliferative brain disease is a craniopharyngioma.

[0368] In an embodiment, the subject has a malignant tumor or a cancer, e.g., a cancer of the central nervous system or peripheral nervous system. In an embodiment, the cancer is present in the hypothalamus. In an embodiment, the cancer is present in the paraventricular hypothalamic nucleus, ventromedial hypothalamic nucleus, or arcuate hypothalamic nucleus. In an embodiment, the subject has a brain cancer. Exemplary brain cancers include glioblastoma, oligodendroglioma, and astrocytoma. In an embodiment, the cancer comprises astrocytoma. In embodiments, the subject is an adult, e.g., 18 years of age or older, e.g., 18, 19, 20, 21, 22, 23, 24, 25, 26, 27, 28, 29, 30, 31, 32, 33, 34, 35, 36, 37, 38, 39, 40, 41, 42, 43, 44, 45, 46, 47, 48, 49, 50, 51, 52, 53, 54, 55, 56, 57, 58, 59, 60, 61, 62, 63, 64, 65, 66, 67, 68, 69, 70, or older.

[0369] In embodiments, the subject is a pediatric subject, e.g., less 18 years of age or younger (e.g., 18, 17, 16, 15, 14, 13, 12, 11, 10, 9, 8, 7, 6, 5, 4, 3, 2, or 1 year of age or younger.

[0370] In an embodiment, the subject has or is identified as having a metabolic syndrome. In an embodiment, the subject has or is identified as having diabetes (e.g., Type 2 diabetes).

[0371] In embodiments, the subject has or is identified as having a defect, e.g., genetic defect, or a mutation, in an MC4R pathway agonizable gene. In embodiments, the subject has or is identified as having a mutation a gene selected from the ARL6, RAI1, SRC1, BBS19, BBS21, CEP290, IFT74, LZTFL1, MKS1, TRIM32, WDPCP, RPS6KA3, HTR2C, KSR2, PROK2, RAB23, MRAP2, AFF4, ADCY3, TUB, OTP, GPR101, TBX3, ACBD7, AGRP, CADM1, CADM2, CARTPT, CCDC28B, CCK, CNR1, CREBBP, CREBRF, CUL4B, DYRK1B, ENPP1, EP300, FMR1, FTO, GHRL, GIPR, GLP1R, INPP5E, INS, INSIG2, IRS1, IRS4, KCTD15, KIDINS220, MCHR1, MSRA, NDN, NEGR1, NLGN2, NPY, NR0B2, NTRK2, PCNT, PCSK2, PHF6, PMCH, PPARG, PYY, SDC3, SEC16B, SLC6A14, SNRPN, THRB, TMEM18, TMEM67, TRAPPC9, UCP1, UCP3, VPS13B, NRP1, NRP2, PLXNA1, PLXNA2, PLXNA3, PLXNA4, SEMA3A, SEMA3B, SEMA3D, SEMA3E, SEMA3F, SEMA3G, DNMT3A, RPGRIP1L, ISL1, or MeCP2 genes. In embodiments, the subject has a disease or disorder associated with a gene in Table 2. In embodiments, the subject has or is identified as having a loss of function mutation in one or more genes in Table 2.

[0372] In embodiments, the subject does not have or is not identified as having a defect, e.g., genetic defect, or a mutation, in an MC4R pathway agonizable gene. In embodiments, the subject does not have or is not identified as having a mutation a gene selected from the ARL6, RAI1, SRC1, BBS19, BBS21, CEP290, IFT74, LZTFL1, MKS1, TRIM32, WDPCP, RPS6KA3, HTR2C, KSR2, PROK2, RAB23, MRAP2, AFF4, ADCY3, TUB, OTP, GPR101, TBX3, ACBD7, AGRP, CADM1, CADM2, CARTPT, CCDC28B, CCK, CNR1, CREBBP, CREBRF, CUL4B, DYRK1B, ENPP1, EP300, FMR1, FTO, GHRL, GIPR, GLP1R, INPP5E, INS, INSIG2, IRS1, IRS4, KCTD15, KIDINS220, MCHR1, MSRA, NDN, NEGR1, NLGN2, NPY, NROB2, NTRK2, PCNT, PCSK2, PHF6, PMCH, PPARG, PYY, SDC3, SEC16B, SLC6A14, SNRPN, THRB, TMEM18, TMEM67, TRAPPC9, UCP1, UCP3, VPS13B, NRP1, NRP2, PLXNA1, PLXNA2, PLXNA3, PLXNA4, SEMA3A, SEMA3B, SEMA3D, SEMA3E, SEMA3F, SEMA3G, DNMT3A, RPGRIP1L, ISL1, or MeCP2 genes. In embodiments, the subject has a disease or disorder associated with a gene in Table 2. In embodiments, the subject has or is identified as having a loss of function mutation in one or more genes in Table 2.

[0373] In embodiments, methods herein can comprise identifying or selecting a subject having a defect e.g., genetic defect, or a mutation, in one or more genes listed in Table 2. In embodiments, methods herein can comprise acquiring knowledge of the genotype, predetermined sequence, or mutation. In embodiments, the methods herein can comprise acquiring knowledge of the genotype of, e.g., of a mutation in one or more of ARL6, RAI1, SRC1, BBS19, BBS21, CEP290, IFT74, LZTFL1, MKS1, TRIM32, WDPCP, RPS6KA3, HTR2C, KSR2, PROK2, RAB23, MRAP2, AFF4, ADCY3, TUB, OTP, GPR101, TBX3, ACBD7, AGRP, CADM1, CADM2, CARTPT, CCDC28B, CCK, CNR1, CREBBP, CREBRF, CUL4B, DYRK1B, ENPP1, EP300, FMR1, FTO, GHRL, GIPR, GLP1R, INPP5E, INS, INSIG2, IRS1, IRS4, KCTD15, KIDINS220, MCHR1, MSRA, NDN, NEGR1, NLGN2, NPY, NROB2, NTRK2, PCNT, PCSK2, PHF6, PMCH, PPARG, PYY, SDC3, SEC16B, SLC6A14, SNRPN, THRB, TMEM18, TMEM67, TRAPPC9, UCP1, UCP3, or VPS13B, NRP1, NRP2, PLXNA1, PLXNA2, PLXNA3, PLXNA4, SEMA3A, SEMA3B, SEMA3D, SEMA3E, SEMA3F, SEMA3G, DNMT3A, RPGRIP1L, ISL1, or MeCP2 genes. In embodiments, the MC4R agonist is administered in response to acquiring knowledge, e.g., detection or identification, of a predetermined sequence, e.g., a mutation, in a gene described herein, one or more of ARL6, RAI1, SRC1, BBS19, BBS21, CEP290, IFT74, LZTFL1, MKS1, TRIM32, WDPCP, RPS6KA3, HTR2C, KSR2, PROK2, RAB23, MRAP2, AFF4, ADCY3, TUB, OTP, GPR101, TBX3, ACBD7, AGRP, CADM1, CADM2, CARTPT, CCDC28B, CCK, CNR1, CREBBP, CREBRF, CUL4B, DYRK1B, ENPP1, EP300, FMR1, FTO, GHRL, GIPR, GLP1R, INPP5E, INS, INSIG2, IRS1, IRS4, KCTD15, KIDINS220, MCHR1, MSRA, NDN, NEGR1, NLGN2, NPY, NR0B2, NTRK2, PCNT, PCSK2, PHF6, PMCH, PPARG, PYY, SDC3, SEC16B, SLC6A14, SNRPN, THRB, TMEM18, TMEM67, TRAPPC9, UCP1, UCP3, or VPS13B, NRP1, NRP2, PLXNA1, PLXNA2, PLXNA3, PLXNA4, SEMA3A, SEMA3B, SEMA3D, SEMA3E, SEMA3F, SEMA3G, DNMT3A, RPGRIP1L, ISL1, or MeCP2 genes.

[0374] In embodiments, identification or selection of a subject as having a certain genotype or predetermined sequence, e.g., mutation, in a gene, can comprise acquiring knowledge of the certain genotype or predetermined sequence, e.g., mutation. Knowledge of the sort can be acquired in a number of ways, as described in detail in the Definitions section.

[0375] In some embodiments, a sequence is acquired, e.g., by obtaining possession of a nucleotide sequence, by “directly acquiring” or “indirectly acquiring” the sequence. “Directly acquiring a sequence” means performing a process (e.g., performing a synthetic or analytical method) to obtain the sequence, such as performing a sequencing method (e.g., a Next Generation Sequencing (NGS) method). “Indirectly acquiring a sequence” refers to receiving information or knowledge of, or receiving, the sequence from another party or source (e.g., a third-party laboratory that directly acquired the sequence). The sequence acquired need not be a full sequence, e.g., sequencing of at least one nucleotide, or obtaining information or knowledge, that identifies a genotype or predetermined sequence, e.g., mutation, disclosed herein as being present in a subject constitutes acquiring a sequence.

[0376] In embodiments, the sequence can be directly acquired. Directly acquiring a sequence includes performing a process that includes a physical change in a physical substance, e.g., a starting material, such as a tissue sample, e.g., a blood sample or tissue biopsy, or analysis of an isolated nucleic acid (e.g., DNA or RNA) sample. Exemplary changes include making a physical entity from two or more starting materials, shearing or fragmenting a substance, such as a genomic DNA fragment; separating or purifying a substance (e.g., isolating a nucleic acid sample from a tissue); combining two or more separate entities into a mixture, performing a chemical reaction that includes breaking or forming a covalent or non-covalent bond. Directly acquiring a value includes performing a process that includes a physical change in a sample or another substance as described above.

[0377] In some embodiments, acquiring knowledge of the certain genotype or predetermined sequence, e.g., mutation, can comprise acquiring a sample, e.g., from which the genotype or predetermined sequence, e.g., mutation, is determined. “Acquiring a sample” as the term is used herein, refers to obtaining possession of a sample, e.g., a tissue sample or nucleic acid sample, by “directly acquiring” or “indirectly acquiring” the sample. “Directly acquiring a sample” means performing a process (e.g., performing a physical method such as a surgery or extraction) to obtain the sample. “Indirectly acquiring a sample” refers to receiving the sample from another party or source (e.g., a third-party laboratory that directly acquired the sample). Directly acquiring a sample includes performing a process that includes a physical change in a physical substance, e.g., a starting material, such as a tissue, e.g., a tissue in a human patient or a tissue that has was previously isolated from a patient. Exemplary changes include making a physical entity from a starting material, dissecting or scraping a tissue; separating or purifying a substance (e.g., a sample tissue or a nucleic acid sample); combining two or more separate entities into a mixture; performing a chemical reaction that includes breaking or forming a covalent or non-covalent bond. Directly acquiring a sample includes performing a process that includes a physical change in a sample or another substance, e.g., as described above.

[0378] In some aspects, provided herein is also a method of evaluating a subject, e.g., for likely responsiveness to a MC4R agonist, e.g., a MC4R agonist described herein, e.g., setmelanotide. In some embodiments, the method comprises acquiring information about the genotype of the subject. In embodiments, the method comprises acquiring information about the presence or absence of a defect, e.g., genetic defect, in one or more genes listed in Table 2 in the subject.

[0379] In embodiments, the subject can be identified as having a defect, e.g., genetic defect, e.g., mutation, in one or more genes listed in Table 2, using methods described herein.

[0380] In embodiments, the identification of the subject having a defect, e.g., genetic defect, e.g., mutation, indicates that the subject is likely to respond (e.g., with an improvement in one or more symptoms) to a MC4R agonist, e.g., a MC4R agonist described herein, e.g., setmelanotide. In embodiments, an improvement in a symptom can include an outcome described herein. For example, an improvement in a symptom can include a reduction of weight (e.g., body weight), a reduction in hunger level, no detectable decrease in energy expenditure (e.g., resting energy expenditure), an increase in energy expenditure (e.g., resting energy expenditure), a reduction in daily/weekly/monthly food intake, or a reduction in waist circumference, e.g., relative to a control.

[0381] In embodiments, the identification of the subject having the defect, e.g., genetic defect, e.g., mutation, indicates that the subject is more likely to respond to (or is likely to have a greater response to) a MC4R agonist, e.g., a MC4R agonist described herein, e.g., setmelanotide, than a subject (e.g., obese subject, e.g., of like age and/or pre-treatment weight) lacking a genetic defect in one or more genes listed in Table 2, e.g., a wild-type obese subject. In embodiments, a subject that is more likely to respond is more likely to have one or more improved symptoms, such as symptoms described herein, e.g., compared to a control, e.g., a subject (e.g., obese subject, e.g., of like age and/or pre-treatment weight) lacking a genetic defect in one or more genes listed in Table 2, e.g., a wild-type obese subject. In embodiments, a subject that is likely to have a greater response is likely to have a greater improvement in symptoms, e.g., symptoms described herein, e.g., greater weight loss, greater decrease in waist circumference, greater increase in resting energy expenditure, greater decrease in food intake, greater decrease in hunger level, e.g., compared to a control, e.g., a subject (e.g., obese subject, e.g., of like age and/or pre-treatment weight) lacking a genetic defect in one or more genes listed in Table 2, e.g., a wild-type obese subject.

[0382] In embodiments, methods described herein further comprise providing a report that identifies the presence or absence of the genetic defect and in some cases an identifier for the subject. In embodiments, the report provides a recommendation on potential therapeutic options, likely effectiveness of a therapeutic option, and/or recommendations/instructions for administration of the therapeutic option (e.g., MC4R agonist, e.g., MC4R agonist described herein, e.g., setmelanotide).

### MC4R Agonists

[0383] Described herein are methods for the treating a non-genetic obesity in a subject, comprising administering to a subject a melanocorin 4 receptor (MC4R) agonist. Examples of naturally occurring MC4R agonists include α-MSH, 3-MSH, γ-MSH and adenocorticitropic hormone (ACTH) or a functional fragment thereof. Examples of synthetic MC4R agonists are described in detail below.

[0384] In some embodiments, an MC4R agonist can be any known agonist of MC4R. In some example embodiment, the MC4R agonist is not an adrenocorticotropic hormone (ACTH) or a fragment thereof. Exemplary MC4R agonists include those described in WO2011104378; WO2011104379; WO201060901; WO200887189, WO200887188, WO200887187, WO200887186; US20110065652; WO2010144341; WO2010144344; WO201065799; WO201065800; WO201065801; WO201065802; WO201037081; WO2009152079; WO2009151383; US20100311648; US20100280079; WO201081666; WO201034500; WO200910299; WO2008116665; WO201052256; WO201052255; WO201126015; US20100120783; WO201096854; US20100190793; WO201025142; WO2014144260; WO2017059075; and WO201015972. Further examples of MC4R agonists are found in U.S. Pat. Nos. 8,263,608; 8,247,530; 8,114,844; and 7,968,548. The entire teachings of these publications are incorporated herein by reference.

[0385] In some embodiments, the MC4R agonist is a compound of any one of Formulas (I), (II), (III), (IV), (V), (VI), (VII), (VIII), (IX), (X), (XI), or (XII), or a pharmaceutically acceptable salt thereof as described herein. In some embodiments, the MC4R agonist is a compound of any one of Formulas (I) or (II), or a pharmaceutically acceptable salt thereof as described herein. In one embodiment, the MC4R agonist is a compound of Formula (I). In one embodiment, the MC4R agonist is a compound of Formula (II).

[0386] In one example embodiment, the agonist of MC4R is a tripeptide D-Phe-Arg-Trp (SEQ ID NO: 560) or a pharmaceutical salt thereof. In another example, the agonist is any peptide that includes SEQ ID NO: 560 or a pharmaceutical salt thereof. In yet another example, the MC4R agonist is an acetylated tripeptide Ac-D-Phe-Arg-Trp-NH₂ (SEQ ID NO: 561) or a pharmaceutical salt thereof.

[0387] In some embodiments, the MC4R agonist is a compound of Formula (I):

[chemical structure]

or a pharmaceutically acceptable salt thereof, wherein A¹ is Acc, HN—(CH₂)ₘ—C(O), L- or D-amino acid, or deleted; A² is Cys, D-Cys, hCys, D-hCys, Pen, D-Pen, Asp, or Glu; A³ is Gly, Ala, β-Ala, Gaba, Aib, D-amino acid, or deleted; A⁴ is His, 2-Pal, 3-Pal, 4-Pal, Taz, 2-Thi, 3-Thi, or (X¹, X², X³, X⁴, X⁵)Phe; A⁵ is D-Phe, D-1-Nal, D-2-Nal, D-Trp, D-Bal, D-(X¹, X², X³, X⁴, X⁵)Phe, L-Phe or D-(Et)Tyr; A⁶ is Arg, hArg, Dab, Dap, Lys, Orn, or HN—CH((CH₂)ₙ—N(R⁴R⁵))—C(O); A⁷ is Trp, 1-Nal, 2-Nal, Bal, Bip, D-Trp, D-2-Nal, D-Bal or D-Bip; A⁸ is Gly, D-Ala, Acc, Ala, 13-Ala, Gaba, Apn, Ahx, Aha, HN—(CH₂)ₛ—C(O), or deleted; A⁹ is Cys, D-Cys, hCys, D-hCys, Pen, D-Pen, Dab, Dap, Orn, or Lys; A¹⁰ is Acc, HN—(CH₂)t-C(O), L- or D-amino acid, or deleted; R¹ is OH or NH₂; each of R² and R³ is, independently for each occurrence, selected from the group consisting of H, (C₁-C₃₀)alkyl, (C₁-C₃₀)heteroalkyl, (C₁-C₃₀)acyl, (C₂-C₃₀)alkenyl, (C₂-C₃₀)alkynyl, aryl(C₁-C₃₀)alkyl, aryl(C₁-C₃₀)acyl, substituted (C₁-C₃₀)alkyl, substituted (C₁-C₃₀)heteroalkyl, substituted (C₁-C₃₀)acyl, substituted (C₂-C₃₀)alkenyl, substituted (C₂-C₃₀)alkynyl, substituted aryl(C₁-C₃₀)alkyl, and substituted aryl(C₁-C₃₀)acyl; each of R⁴ and R⁵ is, independently for each occurrence, H, (C₁-C₄₀)alkyl, (C₁-C₄₀)heteroalkyl, (C₁-C₄₀)acyl, (C₂-C₄₀)alkenyl, (C₂-C₄₀)alkynyl, aryl(C₁-C₄₀)alkyl, aryl(C₁-C₄₀)acyl, substituted (C₁-C₄₀)alkyl, substituted (C₁-C₄₀)heteroalkyl, substituted (C₁-C₄₀)acyl, substituted (C₂-C₄₀)alkenyl, substituted (C₂-C₄₀)alkynyl, substituted aryl(C₁-C₄₀)alkyl, substituted aryl(C₁-C₄₀)acyl, (C₁-C₄₀)alkylsulfonyl, or —C(NH)—NH₂; m is, independently for each occurrence, 1, 2, 3, 4, 5, 6 or 7; n is, independently for each occurrence, 1, 2, 3, 4 or 5; s is, independently for each occurrence, 1, 2, 3, 4, 5, 6, or 7; t is, independently for each occurrence, 1, 2, 3, 4, 5, 6, or 7; X′, X², X³, X⁴, and X⁵ each is, independently for each occurrence, H, F, Cl, Br, I, —(C₁-C₁₀) alkyl, substituted (C₁-C₁₀) alkyl, (C₂-C₁₀) alkenyl, substituted (C₂-C₁₀) alkenyl, (C₂-C₁₀) alkynyl, substituted (C₂-C₁₀) alkynyl, aryl, substituted aryl, OH, NH₂, NO₂, or CN.

[0388] In some embodiments, for Formula (I), when R⁴ is (C₁-C₄₀)acyl, aryl(C₁-C₄₀)acyl, substituted (C₁-C₄₀)acyl, substituted aryl(C₁-C₄₀)acyl, (C₁-C₄₀)alkylsulfonyl, or —C(NH)—NH₂, then R⁵ is H or (C₁-C₄₀)alkyl, (C₁-C₄₀)heteroalkyl, (C₂-C₄₀)alkenyl, (C₂-C₄₀)alkynyl, aryl(C₁-C₄₀)alkyl, substituted (C₁-C₄₀)alkyl, substituted (C₁-C₄₀)heteroalkyl, substituted (C₂-C₄₀)alkenyl, substituted (C₂-C₄₀)alkynyl, or substituted aryl(C₁-C₄₀)alkyl.

[0389] In some embodiments, for Formula (I), when R² is (C₁-C₃₀)acyl, aryl(C₁-C₃₀)acyl, substituted (C₁-C₃₀)acyl, or substituted aryl(C₁-C₃₀)acyl, then R³ is H, (C₁-C₃₀)alkyl, (C₁-C₃₀)heteroalkyl, (C₂-C₃₀)alkenyl, (C₂-C₃₀)alkynyl, aryl(C₁-C₃₀)alkyl, substituted (C₁-C₃₀)alkyl, substituted (C₁-C₃₀)heteroalkyl, substituted (C₂-C₃₀)alkenyl, substituted (C₂-C₃₀)alkynyl, or substituted aryl(C₁-C₃₀)alkyl;

[0390] In some embodiments, for Formula (I), either A³ or A⁸ or both must be present in said compound.

[0391] In some embodiments, for Formula (I) when A² is Cys, D-Cys, hCys, D-hCys, Pen, or D-Pen, then A⁹ is Cys, D-Cys, hCys, D-hCys, Pen, or D-Pen.

[0392] In some embodiments, for Formula (I), when A² is Asp or Glu, then A⁹ is Dab, Dap, Orn, or Lys.

[0393] In some embodiments, for Formula (I), when A⁸ is Ala or Gly, then A¹ is not NIe.

[0394] In some embodiments, for Formula (I), when A¹ is deleted, then R² and R³ cannot both be H.

[0395] In some embodiments, for Formula (I): A¹ is A6c, Arg, D-Arg, Cha, D-Cha, hCha, Chg, D-Chg, Gaba, Ile, Leu, hLeu, Met, -hMet, 2-Nal, D-2-Nal, Nip, Nle, Oic, Phe, D-Phe, hPhe, hPro, Val, or deleted; A² is Asp, Cys, D-Cys, hCys, D-hCys, Glu, Pen, or D-Pen; A³ is D-Abu, Aib, Ala, β-Ala, D-Ala, D-Cha, Gaba, D-Glu, Gly, D-Ile, D-Leu, D-Tle, D-Val, or deleted; A⁴ is His or 3-Pal; As is D-Bal, D-1-Nal, D-2-Nal, D-Phe, D-Trp, or D-(Et)Tyr; A⁶ is Arg, or hArg; A⁷ is Bal, Bip, 1-Nal, 2-Nal, Trp, D-Trp; A⁸ is A6c, D-Ala, Aha, Ahx, Ala, β-Ala, Apn, Gaba, Gly or deleted; A⁹ is Cys, D-Cys, hCys, D-hCys, Lys, Pen, or D-Pen; and A¹⁰ is Thr, or deleted, wherein at least one of A³ or A⁸ is deleted, but not both.

[0396] In some embodiments, the compound of Formula (I) is a compound disclosed in International Patent Application Publication Number WO 2007/008704, which is incorporated herein by reference in its entirety.

[0397] In some embodiments, the compound of Formula (I) is selected from:

(SEQ ID NO: 1)
Ac-Nle-c(Asp-His-D-Phe-Arg-Trp-β-Ala-Lys)-NH₂;
(SEQ ID NO: 2)
Ac-Nle-c(Asp-His-D-Phe-Arg-Trp-A6c-Lys)-NH₂;
(SEQ ID NO: 3)
Ac-Nle-c(Cys-His-D-Phe-Arg-Trp-Ahx-Cys)-NH₂;
(SEQ ID NO: 4)
D-Phe-c(Cys-His-D-Phe-Arg-Trp-Ala-D-Cys)-Thr-NH₂;
(SEQ ID NO: 5)
D-Phe-c(Cys-His-D-Phe-Arg-Trp-β-Ala-D-Cys)-Thr-NH₂;
(SEQ ID NO: 6)
D-Phe-c(Cys-His-D-Phe-Arg-Trp-Gaba-D-Cys)-Thr-NH₂;
(SEQ ID NO: 7)
Ac-Nle-c(Cys-His-D-Phe-Arg-Trp-Apn-Cys)-NH₂;
(SEQ ID NO: 8)
Ac-Nle-c(Asp-His-D-Phe-Arg-Trp-Apn-Lys)-NH₂;
(SEQ ID NO: 9)
Ac-A6c-c(Asp-His-D-Phe-Arg-Trp-Gaba-Lys)-NH₂;
(SEQ ID NO: 10)
Ac-D-2-Nal-c(Asp-His-D-Phe-Arg-Trp-Gaba-Lys)-NH₂;
(SEQ ID NO: 11)
Ac-Cha-c(Asp-His-D-Phe-Arg-Trp-Gaba-Lys)-NH₂;
(SEQ ID NO: 12)
Ac-Nle-c(Asp-His-D-Phe-Arg-Trp-Gaba-Lys)-NH₂;
(SEQ ID NO: 13)
Ac-Nle-c(Cys-D-Ala-His-D-Phe-Arg-Trp-Cys)-NH₂;
(SEQ ID NO: 14)
Ac-Nle-c(Cys-β-Ala-His-D-Phe-Arg-Trp-Cys)-NH₂;
(SEQ ID NO: 15)
Ac-Nle-c(Cys-Gaba-His-D-Phe-Arg-Trp-Cys)-NH₂;
(SEQ ID NO: 16)
Ac-Nle-c(Cys-Aib-His-D-Phe-Arg-Trp-Cys)-NH₂;
(SEQ ID NO: 17)
Ac-Nle-c(Cys-Gly-His-D-Phe-Arg-Trp-Cys)-NH₂;
(SEQ ID NO: 18)
Ac-Nle-c(D-Cys-Ala-His-D-Phe-Arg-Trp-Cys)-NH₂;
(SEQ ID NO: 19)
Ac-Nle-c(D-Cys-D-Ala-His-D-Phe-Arg-Trp-Cys)-NH₂;
(SEQ ID NO: 20)
Ac-Nle-c(D-Cys-β-Ala-His-D-Phe-Arg-Trp-Cys)-NH₂;
(SEQ ID NO: 21)
Ac-Nle-c(D-Cys-Gaba-His-D-Phe-Arg-Trp-Cys)-NH₂;
(SEQ ID NO: 22)
Ac-Nle-c(D-Cys-Aib-His-D-Phe-Arg-Trp-Cys)-NH₂;
(SEQ ID NO: 23)
Ac-Nle-c(D-Cys-Gly-His-D-Phe-Arg-Trp-Cys)-NH₂;
(SEQ ID NO: 24)
Ac-Nle-c(Cys-D-Ala-His-D-Phe-Arg-Trp-D-Cys)-NH₂;
(SEQ ID NO: 25)
Ac-Nle-c(Cys-β-Ala-His-D-Phe-Arg-Trp-D-Cys)-NH₂;
(SEQ ID NO: 26)
Ac-Nle-c(Cys-Gaba-His-D-Phe-Arg-Trp-D-Cys)-NH₂;
(SEQ ID NO: 27)
Ac-Nle-c(Cys-Aib-His-D-Phe-Arg-Trp-D-Cys)-NH₂;
(SEQ ID NO: 28)
Ac-Nle-c(Cys-Gly-His-D-Phe-Arg-Trp-D-Cys)-NH₂;
(SEQ ID NO: 29)
Ac-Nle-c(D-Cys-Ala-His-D-Phe-Arg-Trp-D-Cys)-NH₂;
(SEQ ID NO: 30)
Ac-Nle-c(D-Cys-D-Ala-His-D-Phe-Arg-Trp-D-Cys)-NH₂;
(SEQ ID NO: 31)
Ac-Nle-c(D-Cys-β-Ala-His-D-Phe-Arg-Trp-D-Cys)-NH₂;
(SEQ ID NO: 32)
Ac-Nle-c(D-Cys-Gaba-His-D-Phe-Arg-Trp-D-Cys)-NH₂;
(SEQ ID NO: 33)
Ac-Nle-c(D-Cys-Aib-His-D-Phe-Arg-Trp-D-Cys)-NH₂;
(SEQ ID NO: 34)
Ac-Oic-c(Asp-His-D-Phe-Arg-Trp-Gaba-Lys)-NH₂;
(SEQ ID NO: 35)
Ac-Chg-c(Asp-His-D-Phe-Arg-Trp-Gaba-Lys)-NH₂;
(SEQ ID NO: 36)
Ac-hCha-c(Asp-His-D-Phe-Arg-Trp-Gaba-Lys)-NH₂;
(SEQ ID NO: 37)
Ac-D-Cha-c(Asp-His-D-Phe-Arg-Trp-Gaba-Lys)-NH₂;
(SEQ ID NO: 38)
Ac-D-hCha-c(Asp-His-D-Phe-Arg-Trp-Gaba-Lys)-NH₂;
(SEQ ID NO: 39)
Ac-Nip-c(Asp-His-D-Phe-Arg-Trp-Gaba-Lys)-NH₂;
(SEQ ID NO: 40)
Ac-hPro-c(Asp-His-D-Phe-Arg-Trp-Gaba-Lys)-NH₂;
(SEQ ID NO: 41)
Ac-hLeu-c(Asp-His-D-Phe-Arg-Trp-Gaba-Lys)-NH₂;
(SEQ ID NO: 42)
Ac-Phe-c(Asp-His-D-Phe-Arg-Trp-Gaba-Lys)-NH₂;
(SEQ ID NO: 43)
Ac-D-Phe-c(Asp-His-D-Phe-Arg-Trp-Gaba-Lys)-NH₂;
(SEQ ID NO: 44)
Ac-D-Chg-c(Asp-His-D-Phe-Arg-Trp-Gaba-Lys)-NH₂;
(SEQ ID NO: 45)
n-butanoyl-Cha-c(Asp-His-D-Phe-Arg-Trp-Gaba-Lys)-
NH₂;
(SEQ ID NO: 46)
n-butyryl-Cha-c(Asp-His-D-Phe-Arg-Trp-Gaba-Lys)-NH₂;
(SEQ ID NO: 47)
Ac-hPhe-c(Asp-His-D-Phe-Arg-Trp-Gaba-Lys)-NH₂;
(SEQ ID NO: 48)
Ac-β-hMet-c(Asp-His-D-Phe-Arg-Trp-Gaba-Lys)-NH₂;
(SEQ ID NO: 49)
Ac-Gaba-c(Asp-His-D-Phe-Arg-Trp-Gaba-Lys)-NH₂;
(SEQ ID NO: 50)
Ac-Cha-c(Asp-His-D-Phe-Arg-D-Trp-Ala-Lys)-NH₂;
(SEQ ID NO: 51)
Ac-hCha-c(Asp-His-D-Phe-Arg-D-Trp-Ala-Lys)-NH₂;
(SEQ ID NO: 52)
Ac-Leu-c(Asp-His-D-Phe-Arg-D-Trp-Ala-Lys)-NH₂;
(SEQ ID NO: 53)
Ac-hLeu-c(Asp-His-D-Phe-Arg-D-Trp-Ala-Lys)-NH₂;
(SEQ ID NO: 54)
Ac-Phe-c(Asp-His-D-Phe-Arg-D-Trp-Ala-Lys)-NH₂;
(SEQ ID NO: 55)
Ac-Nle-c(Asp-His-D-Phe-Arg-D-Trp-D-Ala-Lys)-NH₂;
(SEQ ID NO: 56)
Ac-Nle-c(Asp-His-D-Phe-Arg-D-Trp-β-Ala-Lys)-NH₂;
(SEQ ID NO: 57)
Ac-Nle-c(Asp-His-D-Phe-Arg-D-Trp-Gaba-Lys)-NH₂;
(SEQ ID NO: 58)
Ac-Nle-c(Asp-His-D-Phe-Arg-D-Trp-Aha-Lys)-NH₂;
(SEQ ID NO: 59)
Ac-Nle-c(Asp-His-D-Phe-Arg-D-Trp-Apn-Lys)-NH₂;
(SEQ ID NO: 60)
Ac-Nle-c(Cys-His-D-Phe-Arg-D-Trp-Apn-Cys)-NH₂;
(SEQ ID NO: 61)
Ac-Nle-c(Cys-His-D-Phe-Arg-D-Trp-Gaba-Cys)-NH₂;
(SEQ ID NO: 62)
Ac-Nle-c(Cys-His-D-Phe-Arg-D-Trp-Ahx-Cys)-NH₂;
(SEQ ID NO: 63)
Ac-Nle-c(Cys-His-D-Phe-Arg-D-Trp-β-Ala-Cys)-NH₂;
(SEQ ID NO: 64)
Ac-Nle-c(Cys-His-D-Phe-Arg-D-Trp-D-Ala-Cys)-NH₂;
(SEQ ID NO: 65)
Ac-Nle-c(Cys-D-Ala-His-D-2-Nal-Arg-Trp-Cys)-NH₂;
(SEQ ID NO: 66)
Ac-Nle-c(Cys-D-Ala-His-D-2-Nal-Arg-2-Nal-Cys)-NH₂;
(SEQ ID NO: 67)
Ac-Nle-c(Cys-D-Ala-His-D-2-Nal-Arg-1-Nal-Cys)-NH₂;
(SEQ ID NO: 68)
n-butanoyl-Nle-c(Cys-D-Ala-His-D-Phe-Arg-2-Nal-
Cys)-NH₂;
(SEQ ID NO: 69)
n-butanoyl-Nle-c(Cys-D-Ala-His-D-Phe-Arg-Trp-
Cys)-NH₂;
(SEQ ID NO: 70)
Ac-Nle-c(Cys-D-Ala-His-D-Phe-Arg-2-Nal-Cys)-NH₂;
(SEQ ID NO: 71)
Ac-Nle-c(Cys-D-Ala-His-D-Phe-Arg-1-Nal-Cys)-NH₂;
(SEQ ID NO: 72)
Ac-Nle-c(Cys-D-Ala-His-D-Phe-Arg-Bal-Cys)-NH₂;
(SEQ ID NO: 73)
Ac-Nle-c(Cys-D-Glu-His-D-Phe-Arg-Trp-Cys)-NH₂;
(SEQ ID NO: 74)
Ac-Nle-c(Asp-His-D-Phe-Arg-Trp-D-Ala-Lys)-NH₂;
(SEQ ID NO: 75)
Ac-Nle-c(Cys-D-Ala-His-D-2-Nal-Arg-Bal-Cys)-NH₂;
(SEQ ID NO: 76)
Ac-Nle-c(Pen-D-Ala-His-D-Phe-Arg-Trp-Cys)-NH₂;
(SEQ ID NO: 77)
Ac-Nle-c(Cys-D-Ala-His-D-Phe-Arg-Trp-Pen)-NH₂;
(SEQ ID NO: 78)
Ac-Nle-c(Pen-D-Ala-His-D-Phe-Arg-Trp-Pen)-NH₂;
(SEQ ID NO: 79)
D-Phe-c(Cys-His-D-Phe-hArg-Trp-β-Ala-D-Cys)-Thr-
NH₂;
(SEQ ID NO: 80)
D-Phe-c(Cys-His-D-(Et)Tyr-Arg-Trp-β-Ala-D-Cys)-
Thr-NH₂;
(SEQ ID NO: 81)
D-Phe-c(Cys-His-D-Phe-Arg-Bip-β-Ala-D-Cys)-Thr-
NH₂;
(SEQ ID NO: 82)
D-Phe-c(Cys-His-D-(Et)Tyr-hArg-Trp-β-Ala-D-Cys)-
Thr-NH₂;
(SEQ ID NO: 83)
D-Phe-c(Cys-His-D-Phe-hArg-Bip-β-Ala-D-Cys)-Thr-
NH₂;
(SEQ ID NO: 84)
D-Phe-c(Cys-His-D-(Et)Tyr-hArg-Bip-β-Ala-D-Cys)-
Thr-NH₂;
(SEQ ID NO: 85)
Nle-c(Cys-His-D-Phe-Arg-Trp-Apn-Cys)-NH₂;
(SEQ ID NO: 86)
Ac-Nle-c(Asp-D-Ala-His-D-Phe-Arg-Trp-Lys)-NH₂;
(SEQ ID NO: 87)
Ac-Nle-c(Asp-D-Ala-His-D-Phe-Arg-Bal-Lys)-NH₂;
(SEQ ID NO: 88)
Ac-Nle-c(Cys-D-Ala-His-D-Phe-Arg-Trp-Pen)-OH;
(SEQ ID NO: 89)
Ac-Nle-c(Cys-D-Abu-His-D-Phe-Arg-Trp-Cys)-NH₂;
(SEQ ID NO: 90)
Ac-Nle-c(Cys-D-Val-His-D-Phe-Arg-Trp-Cys)-NH₂;
(SEQ ID NO: 91)
Ac-Nle-c(Cys-D-Ile-His-D-Phe-Arg-Trp-Cys)-NH₂;
(SEQ ID NO: 92)
Ac-Nle-c(Cys-D-Leu-His-D-Phe-Arg-Trp-Cys)-NH₂;
(SEQ ID NO: 93)
Ac-Nle-c(Cys-D-Tle-His-D-Phe-Arg-Trp-Cys)-NH₂;
(SEQ ID NO: 94)
Ac-Nle-c(Cys-D-Cha-His-D-Phe-Arg-Trp-Cys)-NH₂;
(SEQ ID NO: 95)
Ac-Nle-c(Pen-His-D-Phe-Arg-Trp-Gaba-Cys)-NH₂;
(SEQ ID NO: 96)
Ac-Nle-c(Cys-His-D-Phe-Arg-Trp-Gaba-Pen)-NH₂;
(SEQ ID NO: 97)
Ac-Nle-c(Pen-His-D-Phe-Arg-Trp-Gaba-Pen)-NH₂;
(SEQ ID NO: 98)
Ac-Leu-c(Cys-His-D-Phe-Arg-Trp-Gaba-Cys)-NH₂;
(SEQ ID NO: 99)
Ac-Cha-c(Cys-His-D-Phe-Arg-Trp-Gaba-Cys)-NH₂;
(SEQ ID NO: 100)
Ac-Ile-c(Cys-His-D-Phe-Arg-Trp-Gaba-Cys)-NH₂;
(SEQ ID NO: 101)
Ac-Phe-c(Cys-His-D-Phe-Arg-Trp-Gaba-Cys)-NH₂;
(SEQ ID NO: 102)
Ac-Val-c(Cys-His-D-Phe-Arg-Trp-Gaba-Cys)-NH₂;
(SEQ ID NO: 103)
Ac-2-Nal-c(Cys-His-D-Phe-Arg-Trp-Gaba-Cys)-NH₂;
(SEQ ID NO: 104)
Nle-c(Cys-His-D-Phe-Arg-Trp-Gaba-Cys)-NH₂;
(SEQ ID NO: 105)
Phe-c(Cys-His-D-Phe-Arg-Trp-Gaba-Cys)-NH₂;
(SEQ ID NO: 106)
Ac-Nle-c(Cys-3-Pal-D-Phe-Arg-Trp-Gaba-Cys)-NH₂;
(SEQ ID NO: 107)
Ac-Nle-c(Cys-D-Ala-His-D-Phe-Arg-Trp-Cys)-OH;
(SEQ ID NO: 108)
Ac-Nle-c(Cys-His-Phe-Arg-D-Trp-Gaba-Cys)-NH₂;
(SEQ ID NO: 109)
Ac-Nle-c(Asp-His-D-2-Nal-Arg-Trp-Ala-Lys)-NH₂;
(SEQ ID NO: 110)
Ac-Nle-c(Asp-His-D-2-Nal-Arg-Trp-β-Ala-Lys)-NH₂;
(SEQ ID NO: 111)
Ac-Nle-c(Cys-His-D-2-Nal-Arg-Trp-Gaba-Cys)-NH₂;
(SEQ ID NO: 112)
Ac-Nle-c(Cys-His-D-2-Nal-Arg-Trp-Ahx-Cys)-NH₂;
(SEQ ID NO: 113)
Ac-hPhe-c(Asp-His-D-2-Nal-Arg-Trp-Gaba-Lys)-NH₂;
(SEQ ID NO: 114)
Ac-Cha-c(Asp-His-D-2-Nal-Arg-Trp-Gaba-Lys)-NH₂;
(SEQ ID NO: 115)
Ac-Nle-c(Asp-His-D-Phe-Arg-Trp-β-Ala-Lys)-OH;
(SEQ ID NO: 116)
Ac-Nle-c(Cys-His-D-Phe-Arg-Trp-Ahx-Cys)-OH;
(SEQ ID NO: 117)
D-Phe-c(Cys-His-D-Phe-Arg-Trp-Ala-D-Cys)-Thr-OH;
(SEQ ID NO: 118)
D-Phe-c(Cys-His-D-Phe-Arg-Trp-β-Ala-D-Cys)-Thr-OH;
(SEQ ID NO: 119)
D-Phe-c(Cys-His-D-Phe-Arg-Trp-Gaba-D-Cys)-Thr-OH;
(SEQ ID NO: 120)
Ac-Nle-c(Cys-His-D-Phe-Arg-Trp-Apn-Cys)-OH;
(SEQ ID NO: 121)
Ac-Nle-c(Asp-His-D-Phe-Arg-Trp-Apn-Lys)-OH;
(SEQ ID NO: 122)
Ac-Cha-c(Asp-His-D-Phe-Arg-Trp-Gaba-Lys)-OH;
(SEQ ID NO: 123)
Ac-Nle-c(Asp-His-D-Phe-Arg-Trp-Gaba-Lys)-OH;
(SEQ ID NO: 124)
Ac-Chg-c(Asp-His-D-Phe-Arg-Trp-Gaba-Lys)-OH;
(SEQ ID NO: 125)
Ac-D-Cha-c(Asp-His-D-Phe-Arg-Trp-Gaba-Lys)-OH;
(SEQ ID NO: 126)
Ac-hCha-c(Asp-His-D-Phe-Arg-Trp-Gaba-Lys)-OH;
(SEQ ID NO: 127)
Ac-D-Chg-c(Asp-His-D-Phe-Arg-Trp-Gaba-Lys)-OH;
(SEQ ID NO: 128)
Ac-hPhe-c(Asp-His-D-Phe-Arg-Trp-Gaba-Lys)-OH;
(SEQ ID NO: 129)
Ac-Nle-c(Cys-His-D-Phe-Arg-D-Trp-Gaba-Cys)-OH;
(SEQ ID NO: 130)
Ac-Nle-c(Cys-His-D-Phe-Arg-D-Trp-Ahx-Cys)-OH;
(SEQ ID NO: 131)
Ac-Nle-c(Cys-His-D-Phe-Arg-D-Trp-β-Ala-Cys)-OH;
(SEQ ID NO: 132)
Ac-Nle-c(Cys-His-D-Phe-Arg-D-Trp-D-Ala-Cys)-OH;
(SEQ ID NO: 133)
Ac-Nle-c(Cys-D-Ala-His-D-2-Nal-Arg-Trp-Cys)-OH;
(SEQ ID NO: 134)
Ac-Nle-c(Cys-D-Ala-His-D-2-Nal-Arg-2-Nal-Cys)-OH;
(SEQ ID NO: 135)
Ac-Nle-c(Cys-D-Ala-His-D-2-Nal-Arg-1-Nal-Cys)-OH;
(SEQ ID NO: 136)
Ac-Nle-c(Cys-D-Ala-His-D-2-Nal-Arg-Bal-Cys)-OH;
(SEQ ID NO: 137)
Ac-Nle-c(Pen-D-Ala-His-D-Phe-Arg-Trp-Cys)-OH;
(SEQ ID NO: 138)
Ac-Nle-c(Cys-His-D-Phe-Arg-Trp-Gaba-Pen)-OH;
(SEQ ID NO: 139)
Ac-Arg-c(Cys-D-Ala-His-D-2-Nal-Arg-Trp-Cys)-NH₂;
(SEQ ID NO: 140)
Ac-Arg-c(Cys-D-Ala-His-D-Phe-Arg-Trp-Cys)-NH₂;
(SEQ ID NO: 141)
Ac-D-Arg-c(Cys-D-Ala-His-D-Phe-Arg-Trp-Cys)-NH₂;
(SEQ ID NO: 142)
Ac-D-Arg-c(Cys-D-Ala-His-D-Phe-Arg-Trp-Pen)-NH₂;
(SEQ ID NO: 143)
Ac-D-Arg-c(Cys-His-D-Phe-Arg-Trp-Gaba-Pen)-NH₂;
(SEQ ID NO: 144)
Ac-Arg-c(Cys-His-D-Phe-Arg-Trp-Gaba-Pen)-NH₂;
(SEQ ID NO: 145)
Ac-Arg-c(Cys-D-Ala-His-D-Phe-Arg-Trp-Pen)-NH₂;
(SEQ ID NO: 146)
Ac-D-Arg-c(Asp-His-D-Phe-Arg-Trp-Ala-Lys)-NH2;
and
(SEQ ID NO: 147)
Ac-Arg-c(Asp-His-D-Phe-Arg-Trp-Ala-Lys)-NH₂,

[0398] or a pharmaceutically acceptable salt thereof. In embodiments, the compound of Formula (I) is Ac-Arg-c(Cys-D-Ala-His-D-Phe-Arg-Trp-Cys)-NH₂ (SEQ ID NO: 140) or a pharmaceutically acceptable salt thereof. Ac-Arg-c(Cys-D-Ala-His-D-Phe-Arg-Trp-Cys)-NH₂ (SEQ ID NO: 140), also known as RM-493 and setmelanotide, is a peptide that retains the specificity and functionality of the naturally occurring hormone that activates MC4R and has not been shown to adversely affect blood pressure in clinical trials (see, e.g., Chen et al. J Clin. Endocrinol. Metab. 2015; 100(4):1639-45. The structure of Ac-Arg-c(Cys-D-Ala-His-D-Phe-Arg-Trp-Cys)-NH₂ (SEQ ID NO: 140) is shown below:

[chemical structure]

[0399] In some embodiments, the MC4R agonist is a compound of Formula (I-a):

[chemical structure]

[0400] or a pharmaceutically acceptable salt thereof, wherein:
[0401] A¹ is Phe, D-Phe, or Nle;
[0402] A² is Cys;
[0403] A³ is deleted;
[0404] A⁴ is His;
[0405] A⁵ is D-Phe or D-(Et)Tyr;
[0406] A⁶ is Arg or hArg;
[0407] A⁷ is Trp or Bip;
[0408] A⁸ is Ala, β-Ala, Gaba, or Apn;
[0409] A⁹ is D-Cys; and
[0410] A¹⁰ is Thr or deleted.

[0411] In some embodiments, the compound of Formula (I-a) is selected from:

(SEQ ID NO: 4)
D-Phe-c(Cys-His-D-Phe-Arg-Trp-Ala-D-Cys)-Thr-NH₂;
(SEQ ID NO: 5)
D-Phe-c(Cys-His-D-Phe-Arg-Trp-β-Ala-D-Cys)-Thr-
NH₂;
(SEQ ID NO: 6)
D-Phe-c(Cys-His-D-Phe-Arg-Trp-Gaba-D-Cys)-Thr-NH₂;
(SEQ ID NO: 79)
D-Phe-c(Cys-His-D-Phe-hArg-Trp-β-Ala-D-Cys)-Thr-NH₂;
(SEQ ID NO: 80)
D-Phe-c(Cys-His-D-(Et)Tyr-Arg-Trp-β-Ala-D-Cys)-
Thr-NH₂;
(SEQ ID NO: 81)
D-Phe-c(Cys-His-D-Phe-Arg-Bip-β-Ala-D-Cys)-Thr-
NH₂;
(SEQ ID NO: 82)
D-Phe-c(Cys-His-D-(Et)Tyr-hArg-Trp-β-Ala-D-Cys)-
Thr-NH₂;
(SEQ ID NO: 83)
D-Phe-c(Cys-His-D-Phe-hArg-Bip-β-Ala-D-Cys)-Thr-
NH₂;
(SEQ ID NO: 84)
D-Phe-c(Cys-His-D-(Et)Tyr-hArg-Bip-β-Ala-D-Cys)-
Thr-NH₂;
(SEQ ID NO: 85)
Nle-c(Cys-His-D-Phe-Arg-Trp-Apn-Cys)-NH₂;
and
(SEQ ID NO: 105)
Phe-c(Cys-His-D-Phe-Arg-Trp-Gaba-Cys)-NH₂.

[0412] In some embodiments, the MC4R agonist is a compound of Formula (I-b):

[chemical structure]

[0413] or a pharmaceutically acceptable salt thereof, wherein:
[0414] A¹ is Nle, A6c, D-2-Nal, Cha, Oic, Chg, hCha, D-Cha, D-hCha, Nip, hPro, hLeu, Phe, D-Phe, D-Chg, hPhe, β-hMet, Gaba, Leu, Ile, Val, 2-Nal, Arg or D-Arg;
[0415] A² is Asp, Cys, D-Cys, or Pen;
[0416] A³ is D-Ala, R-Ala, Gaba, Aib, Gly, Ala, D-Glu, D-Abu, D-Val, D-Ile, D-Leu, D-Tle, D-Cha, deleted;
[0417] A⁴ His or 3-Pal;
[0418] A⁵ is Phe, D-Phe, or D-2-Nal;
[0419] A⁶ is Arg;
[0420] A⁷ is Trp, 1-Nal, 2-Nal, Bal, or D-Trp;
[0421] A⁸ is β-Ala, A6c, Ahx, Apn, Gaba, Ala, Aha, D-Ala or deleted;
[0422] A⁹ is Lys, Cys, D-Cys, or Pen;
[0423] A¹⁰ is deleted.
[0424] wherein A² and A⁹ are pairwise selected to form a disulfide or lactam bridge.

[0425] In some embodiments, the compound of Formula (I-b) is selected from:

(SEQ ID NO: 1)
Ac-Nle-c(Asp-His-D-Phe-Arg-Trp-β-Ala-Lys)-NH₂;
(SEQ ID NO: 2)
Ac-Nle-c(Asp-His-D-Phe-Arg-Trp-A6c-Lys)-NH₂;
(SEQ ID NO: 3)
Ac-Nle-c(Cys-His-D-Phe-Arg-Trp-Ahx-Cys)-NH₂;
(SEQ ID NO: 7)
Ac-Nle-c(Cys-His-D-Phe-Arg-Trp-Apn-Cys)-NH₂;
(SEQ ID NO: 8)
Ac-Nle-c(Asp-His-D-Phe-Arg-Trp-Apn-Lys)-NH₂;
(SEQ ID NO: 9)
Ac-A6c-c(Asp-His-D-Phe-Arg-Trp-Gaba-Lys)-NH₂;
(SEQ ID NO: 10)
Ac-D-2-Nal-c(Asp-His-D-Phe-Arg-Trp-Gaba-Lys)-NH₂;
(SEQ ID NO: 11)
Ac-Cha-c(Asp-His-D-Phe-Arg-Trp-Gaba-Lys)-NH₂;
(SEQ ID NO: 12)
Ac-Nle-c(Asp-His-D-Phe-Arg-Trp-Gaba-Lys)-NH₂;
(SEQ ID NO: 13)
Ac-Nle-c(Cys-D-Ala-His-D-Phe-Arg-Trp-Cys)-NH₂;
(SEQ ID NO: 14)
Ac-Nle-c(Cys-β-Ala-His-D-Phe-Arg-Trp-Cys)-NH₂;
(SEQ ID NO: 15)
Ac-Nle-c(Cys-Gaba-His-D-Phe-Arg-Trp-Cys)-NH₂;
(SEQ ID NO: 16)
Ac-Nle-c(Cys-Aib-His-D-Phe-Arg-Trp-Cys)-NH₂;
(SEQ ID NO: 17)
Ac-Nle-c(Cys-Gly-His-D-Phe-Arg-Trp-Cys)-NH₂;
(SEQ ID NO: 18)
Ac-Nle-c(D-Cys-Ala-His-D-Phe-Arg-Trp-Cys)-NH₂;
(SEQ ID NO: 19)
Ac-Nle-c(D-Cys-D-Ala-His-D-Phe-Arg-Trp-Cys)-NH₂;
(SEQ ID NO: 20)
Ac-Nle-c(D-Cys-β-Ala-His-D-Phe-Arg-Trp-Cys)-NH₂;
(SEQ ID NO: 21)
Ac-Nle-c(D-Cys-Gaba-His-D-Phe-Arg-Trp-Cys)-NH₂;
(SEQ ID NO: 22)
Ac-Nle-c(D-Cys-Aib-His-D-Phe-Arg-Trp-Cys)-NH₂;
(SEQ ID NO: 23)
Ac-Nle-c(D-Cys-Gly-His-D-Phe-Arg-Trp-Cys)-NH₂;
(SEQ ID NO: 24)
Ac-Nle-c(Cys-D-Ala-His-D-Phe-Arg-Trp-D-Cys)-NH₂;
(SEQ ID NO: 25)
Ac-Nle-c(Cys-β-Ala-His-D-Phe-Arg-Trp-D-Cys)-NH₂;
(SEQ ID NO: 26)
Ac-Nle-c(Cys-Gaba-His-D-Phe-Arg-Trp-D-Cys)-NH₂;
(SEQ ID NO: 27)
Ac-Nle-c(Cys-Aib-His-D-Phe-Arg-Trp-D-Cys)-NH₂;
(SEQ ID NO: 28)
Ac-Nle-c(Cys-Gly-His-D-Phe-Arg-Trp-D-Cys)-NH₂;
(SEQ ID NO: 29)
Ac-Nle-c(D-Cys-Ala-His-D-Phe-Arg-Trp-D-Cys)-NH₂;
(SEQ ID NO: 30)
Ac-Nle-c(D-Cys-D-Ala-His-D-Phe-Arg-Trp-D-Cys)-NH₂;
(SEQ ID NO: 31)
Ac-Nle-c(D-Cys-β-Ala-His-D-Phe-Arg-Trp-D-Cys)-NH₂;
(SEQ ID NO: 32)
Ac-Nle-c(D-Cys-Gaba-His-D-Phe-Arg-Trp-D-Cys)-NH₂;
(SEQ ID NO: 33)
Ac-Nle-c(D-Cys-Aib-His-D-Phe-Arg-Trp-D-Cys)-NH₂;
(SEQ ID NO: 34)
Ac-Oic-c(Asp-His-D-Phe-Arg-Trp-Gaba-Lys)-NH₂;
(SEQ ID NO: 35)
Ac-Chg-c(Asp-His-D-Phe-Arg-Trp-Gaba-Lys)-NH₂;
(SEQ ID NO: 36)
Ac-hCha-c(Asp-His-D-Phe-Arg-Trp-Gaba-Lys)-NH₂;
(SEQ ID NO: 37)
Ac-D-Cha-c(Asp-His-D-Phe-Arg-Trp-Gaba-Lys)-NH₂;
(SEQ ID NO: 38)
Ac-D-hCha-c(Asp-His-D-Phe-Arg-Trp-Gaba-Lys)-NH₂;
(SEQ ID NO: 39)
Ac-Nip-c(Asp-His-D-Phe-Arg-Trp-Gaba-Lys)-NH₂;
(SEQ ID NO: 40)
Ac-hPro-c(Asp-His-D-Phe-Arg-Trp-Gaba-Lys)-NH₂;
(SEQ ID NO: 41)
Ac-hLeu-c(Asp-His-D-Phe-Arg-Trp-Gaba-Lys)-NH₂;
(SEQ ID NO: 42)
Ac-Phe-c(Asp-His-D-Phe-Arg-Trp-Gaba-Lys)-NH₂;
(SEQ ID NO: 43)
Ac-D-Phe-c(Asp-His-D-Phe-Arg-Trp-Gaba-Lys)-NH₂;
(SEQ ID NO: 44)
Ac-D-Chg-c(Asp-His-D-Phe-Arg-Trp-Gaba-Lys)-NH₂;
(SEQ ID NO: 47)
Ac-hPhe-c(Asp-His-D-Phe-Arg-Trp-Gaba-Lys)-NH₂;
(SEQ ID NO: 48)
Ac-β-hMet-c(Asp-His-D-Phe-Arg-Trp-Gaba-Lys)-NH₂;
(SEQ ID NO: 49)
Ac-Gaba-c(Asp-His-D-Phe-Arg-Trp-Gaba-Lys)-NH₂;
(SEQ ID NO: 50)
Ac-Cha-c(Asp-His-D-Phe-Arg-D-Trp-Ala-Lys)-NH₂;
(SEQ ID NO: 51)
Ac-hCha-c(Asp-His-D-Phe-Arg-D-Trp-Ala-Lys)-NH₂;
(SEQ ID NO: 52)
Ac-Leu-c(Asp-His-D-Phe-Arg-D-Trp-Ala-Lys)-NH₂;
(SEQ ID NO: 53)
Ac-hLeu-c(Asp-His-D-Phe-Arg-D-Trp-Ala-Lys)-NH₂;
(SEQ ID NO: 54)
Ac-Phe-c(Asp-His-D-Phe-Arg-D-Trp-Ala-Lys)-NH₂;
(SEQ ID NO: 55)
Ac-Nle-c(Asp-His-D-Phe-Arg-D-Trp-D-Ala-Lys)-NH₂;
(SEQ ID NO: 56)
Ac-Nle-c(Asp-His-D-Phe-Arg-D-Trp-β-Ala-Lys)-NH₂;
(SEQ ID NO: 57)
Ac-Nle-c(Asp-His-D-Phe-Arg-D-Trp-Gaba-Lys)-NH₂;
(SEQ ID NO: 58)
Ac-Nle-c(Asp-His-D-Phe-Arg-D-Trp-Aha-Lys)-NH₂;
(SEQ ID NO: 59)
Ac-Nle-c(Asp-His-D-Phe-Arg-D-Trp-Apn-Lys)-NH₂;
(SEQ ID NO: 60)
Ac-Nle-c(Cys-His-D-Phe-Arg-D-Trp-Apn-Cys)-NH₂;
(SEQ ID NO: 61)
Ac-Nle-c(Cys-His-D-Phe-Arg-D-Trp-Gaba-Cys)-NH₂;
(SEQ ID NO: 62)
Ac-Nle-c(Cys-His-D-Phe-Arg-D-Trp-Ahx-Cys)-NH₂;
(SEQ ID NO: 63)
Ac-Nle-c(Cys-His-D-Phe-Arg-D-Trp-β-Ala-Cys)-NH₂;
(SEQ ID NO: 64)
Ac-Nle-c(Cys-His-D-Phe-Arg-D-Trp-D-Ala-Cys)-NH₂;
(SEQ ID NO: 65)
Ac-Nle-c(Cys-D-Ala-His-D-2-Nal-Arg-Trp-Cys)-NH₂;
(SEQ ID NO: 66)
Ac-Nle-c(Cys-D-Ala-His-D-2-Nal-Arg-2-Nal-Cys)-NH₂;
(SEQ ID NO: 67)
Ac-Nle-c(Cys-D-Ala-His-D-2-Nal-Arg-1-Nal-Cys)-NH₂;
(SEQ ID NO: 70)
Ac-Nle-c(Cys-D-Ala-His-D-Phe-Arg-2-Nal-Cys)-NH₂;
(SEQ ID NO: 71)
Ac-Nle-c(Cys-D-Ala-His-D-Phe-Arg-1-Nal-Cys)-NH₂;
(SEQ ID NO: 72)
Ac-Nle-c(Cys-D-Ala-His-D-Phe-Arg-Bal-Cys)-NH₂;
(SEQ ID NO: 73)
Ac-Nle-c(Cys-D-Glu-His-D-Phe-Arg-Trp-Cys)-NH₂;
(SEQ ID NO: 74)
Ac-Nle-c(Asp-His-D-Phe-Arg-Trp-D-Ala-Lys)-NH₂;
(SEQ ID NO: 75)
Ac-Nle-c(Cys-D-Ala-His-D-2-Nal-Arg-Bal-Cys)-NH₂;
(SEQ ID NO: 76)
Ac-Nle-c(Pen-D-Ala-His-D-Phe-Arg-Trp-Cys)-NH₂;
(SEQ ID NO: 77)
Ac-Nle-c(Cys-D-Ala-His-D-Phe-Arg-Trp-Pen)-NH₂;
(SEQ ID NO: 78)
Ac-Nle-c(Pen-D-Ala-His-D-Phe-Arg-Trp-Pen)-NH₂;
(SEQ ID NO: 86)
Ac-Nle-c(Asp-D-Ala-His-D-Phe-Arg-Trp-Lys)-NH₂;
(SEQ ID NO: 87)
Ac-Nle-c(Asp-D-Ala-His-D-Phe-Arg-Bal-Lys)-NH₂;
(SEQ ID NO: 89)
Ac-Nle-c(Cys-D-Abu-His-D-Phe-Arg-Trp-Cys)-NH₂;
(SEQ ID NO: 90)
Ac-Nle-c(Cys-D-Val-His-D-Phe-Arg-Trp-Cys)-NH₂;
(SEQ ID NO: 91)
Ac-Nle-c(Cys-D-Ile-His-D-Phe-Arg-Trp-Cys)-NH₂;
(SEQ ID NO: 92)
Ac-Nle-c(Cys-D-Leu-His-D-Phe-Arg-Trp-Cys)-NH₂;
(SEQ ID NO: 93)
Ac-Nle-c(Cys-D-Tle-His-D-Phe-Arg-Trp-Cys)-NH₂;
(SEQ ID NO: 94)
Ac-Nle-c(Cys-D-Cha-His-D-Phe-Arg-Trp-Cys)-NH₂;
(SEQ ID NO: 95)
Ac-Nle-c(Pen-His-D-Phe-Arg-Trp-Gaba-Cys)-NH₂;
(SEQ ID NO: 96)
Ac-Nle-c(Cys-His-D-Phe-Arg-Trp-Gaba-Pen)-NH₂;
(SEQ ID NO: 97)
Ac-Nle-c(Pen-His-D-Phe-Arg-Trp-Gaba-Pen)-NH₂;
(SEQ ID NO: 98)
Ac-Leu-c(Cys-His-D-Phe-Arg-Trp-Gaba-Cys)-NH₂;
(SEQ ID NO: 99)
Ac-Cha-c(Cys-His-D-Phe-Arg-Trp-Gaba-Cys)-NH₂;
(SEQ ID NO: 100)
Ac-Ile-c(Cys-His-D-Phe-Arg-Trp-Gaba-Cys)-NH₂;
(SEQ ID NO: 101)
Ac-Phe-c(Cys-His-D-Phe-Arg-Trp-Gaba-Cys)-NH₂;
(SEQ ID NO: 102)
Ac-Val-c(Cys-His-D-Phe-Arg-Trp-Gaba-Cys)-NH₂;
(SEQ ID NO: 103)
Ac-2-Nal-c(Cys-His-D-Phe-Arg-Trp-Gaba-Cys)-NH₂;
(SEQ ID NO: 106)
Ac-Nle-c(Cys-3-Pal-D-Phe-Arg-Trp-Gaba-Cys)-NH₂;
(SEQ ID NO: 108)
Ac-Nle-c(Cys-His-Phe-Arg-D-Trp-Gaba-Cys)-NH₂;
(SEQ ID NO: 109)
Ac-Nle-c(Asp-His-D-2-Nal-Arg-Trp-Ala-Lys)-NH₂;
(SEQ ID NO: 110)
Ac-Nle-c(Asp-His-D-2-Nal-Arg-Trp-β-Ala-Lys)-NH₂;
(SEQ ID NO: 111)
Ac-Nle-c(Cys-His-D-2-Nal-Arg-Trp-Gaba-Cys)-NH₂;
(SEQ ID NO: 112)
Ac-Nle-c(Cys-His-D-2-Nal-Arg-Trp-Ahx-Cys)-NH₂;
(SEQ ID NO: 113)
Ac-hPhe-c(Asp-His-D-2-Nal-Arg-Trp-Gaba-Lys)-NH₂;
(SEQ ID NO: 114)
Ac-Cha-c(Asp-His-D-2-Nal-Arg-Trp-Gaba-Lys)-NH₂;
(SEQ ID NO: 139)
Ac-Arg-c(Cys-D-Ala-His-D-2-Nal-Arg-Trp-Cys)-NH₂;
(SEQ ID NO: 140)
Ac-Arg-c(Cys-D-Ala-His-D-Phe-Arg-Trp-Cys)-NH₂;
(SEQ ID NO: 141)
Ac-D-Arg-c(Cys-D-Ala-His-D-Phe-Arg-Trp-Cys)-NH₂;
(SEQ ID NO: 142)
Ac-D-Arg-c(Cys-D-Ala-His-D-Phe-Arg-Trp-Pen)-NH₂;
(SEQ ID NO: 143)
Ac-D-Arg-c(Cys-His-D-Phe-Arg-Trp-Gaba-Pen)-NH₂;
(SEQ ID NO: 144)
Ac-Arg-c(Cys-His-D-Phe-Arg-Trp-Gaba-Pen)-NH₂;
(SEQ ID NO: 145)
Ac-Arg-c(Cys-D-Ala-His-D-Phe-Arg-Trp-Pen)-NH₂;
(SEQ ID NO: 146)
Ac-D-Arg-c(Asp-His-D-Phe-Arg-Trp-Ala-Lys)-NH₂;
and
(SEQ ID NO: 147)
Ac-Arg-c(Asp-His-D-Phe-Arg-Trp-Ala-Lys)-NH₂.

[0426] In some embodiments, the MC4R agonist is a compound of Formula (I-c):

[chemical structure]

[0427] or a pharmaceutically acceptable salt thereof, wherein:
[0428] A² is Asp, Cys, D-Cys, or Pen;
[0429] A³ is D-Ala, β-Ala, Gaba, Aib, Gly, Ala, Aib, Dl-Glu, D-Abu, D-Val, D-Ile, D-Leu, D-Tle, D-Cha, or deleted;
[0430] A⁴ is His or 3-Pal;
[0431] A⁵ is D-Phe, D-2-Nal, or Phe;
[0432] A⁶ is Arg;
[0433] A⁷ is Trp, D-Trp, 2-Nal, 1-Nal, Bal;
[0434] A⁸ is β-Ala, A6c, Ahx, Apn, Gaba, D-Ala, Aha, Ala or deleted;
[0435] A⁹ is Lys, Cys, D-Cys or Pen; and
[0436] A¹⁰ is deleted,
[0437] wherein A² and A⁹ are pairwise selected to form a disulfide or lactam bridge.

[0438] In some embodiments, the compound of Formula (I-c) is selected from:

(SEQ ID NO: 1)
Ac-Nle-c(Asp-His-D-Phe-Arg-Trp-β-Ala-Lys)-NH₂;
(SEQ ID NO: 2)
Ac-Nle-c(Asp-His-D-Phe-Arg-Trp-A6c-Lys)-NH₂;
(SEQ ID NO: 3)
Ac-Nle-c(Cys-His-D-Phe-Arg-Trp-Ahx-Cys)-NH₂;
(SEQ ID NO: 7)
Ac-Nle-c(Cys-His-D-Phe-Arg-Trp-Apn-Cys)-NH₂;
(SEQ ID NO: 8)
Ac-Nle-c(Asp-His-D-Phe-Arg-Trp-Apn-Lys)-NH₂;
(SEQ ID NO: 12)
Ac-Nle-c(Asp-His-D-Phe-Arg-Trp-Gaba-Lys)-NH₂;
(SEQ ID NO: 13)
Ac-Nle-c(Cys-D-Ala-His-D-Phe-Arg-Trp-Cys)-NH₂;
(SEQ ID NO: 14)
Ac-Nle-c(Cys-β-Ala-His-D-Phe-Arg-Trp-Cys)-NH₂;
(SEQ ID NO: 15)
Ac-Nle-c(Cys-Gaba-His-D-Phe-Arg-Trp-Cys)-NH₂;
(SEQ ID NO: 16)
Ac-Nle-c(Cys-Aib-His-D-Phe-Arg-Trp-Cys)-NH₂;
(SEQ ID NO: 17)
Ac-Nle-c(Cys-Gly-His-D-Phe-Arg-Trp-Cys)-NH₂;
(SEQ ID NO: 18)
Ac-Nle-c(D-Cys-Ala-His-D-Phe-Arg-Trp-Cys)-NH₂;
(SEQ ID NO: 19)
Ac-Nle-c(D-Cys-D-Ala-His-D-Phe-Arg-Trp-Cys)-NH₂;
(SEQ ID NO: 20)
Ac-Nle-c(D-Cys-β-Ala-His-D-Phe-Arg-Trp-Cys)-NH₂;
(SEQ ID NO: 21)
Ac-Nle-c(D-Cys-Gaba-His-D-Phe-Arg-Trp-Cys)-NH₂;
(SEQ ID NO: 22)
Ac-Nle-c(D-Cys-Aib-His-D-Phe-Arg-Trp-Cys)-NH₂;
(SEQ ID NO: 23)
Ac-Nle-c(D-Cys-Gly-His-D-Phe-Arg-Trp-Cys)-NH₂;
(SEQ ID NO: 24)
Ac-Nle-c(Cys-D-Ala-His-D-Phe-Arg-Trp-D-Cys)-NH₂;
(SEQ ID NO: 25)
Ac-Nle-c(Cys-β-Ala-His-D-Phe-Arg-Trp-D-Cys)-NH₂;
(SEQ ID NO: 26)
Ac-Nle-c(Cys-Gaba-His-D-Phe-Arg-Trp-D-Cys)-NH₂;
(SEQ ID NO: 27)
Ac-Nle-c(Cys-Aib-His-D-Phe-Arg-Trp-D-Cys)-NH₂;
(SEQ ID NO: 28)
Ac-Nle-c(Cys-Gly-His-D-Phe-Arg-Trp-D-Cys)-NH₂;
(SEQ ID NO: 29)
Ac-Nle-c(D-Cys-Ala-His-D-Phe-Arg-Trp-D-Cys)-NH₂;
(SEQ ID NO: 30)
Ac-Nle-c(D-Cys-D-Ala-His-D-Phe-Arg-Trp-D-Cys)-NH₂;
(SEQ ID NO: 31)
Ac-Nle-c(D-Cys-β-Ala-His-D-Phe-Arg-Trp-D-Cys)-NH₂;
(SEQ ID NO: 32)
Ac-Nle-c(D-Cys-Gaba-His-D-Phe-Arg-Trp-D-Cys)-NH₂;
(SEQ ID NO: 33)
Ac-Nle-c(D-Cys-Aib-His-D-Phe-Arg-Trp-D-Cys)-NH₂;
(SEQ ID NO: 55)
Ac-Nle-c(Asp-His-D-Phe-Arg-D-Trp-D-Ala-Lys)-NH₂;
(SEQ ID NO: 56)
Ac-Nle-c(Asp-His-D-Phe-Arg-D-Trp-β-Ala-Lys)-NH₂;
(SEQ ID NO: 57)
Ac-Nle-c(Asp-His-D-Phe-Arg-D-Trp-Gaba-Lys)-NH₂;
(SEQ ID NO: 58)
Ac-Nle-c(Asp-His-D-Phe-Arg-D-Trp-Aha-Lys)-NH₂;
(SEQ ID NO: 59)
Ac-Nle-c(Asp-His-D-Phe-Arg-D-Trp-Apn-Lys)-NH₂;
(SEQ ID NO: 60)
Ac-Nle-c(Cys-His-D-Phe-Arg-D-Trp-Apn-Cys)-NH₂;
(SEQ ID NO: 61)
Ac-Nle-c(Cys-His-D-Phe-Arg-D-Trp-Gaba-Cys)-NH₂;
(SEQ ID NO: 62)
Ac-Nle-c(Cys-His-D-Phe-Arg-D-Trp-Ahx-Cys)-NH₂;
(SEQ ID NO: 63)
Ac-Nle-c(Cys-His-D-Phe-Arg-D-Trp-β-Ala-Cys)-NH₂;
(SEQ ID NO: 64)
Ac-Nle-c(Cys-His-D-Phe-Arg-D-Trp-D-Ala-Cys)-NH₂;
(SEQ ID NO: 65)
Ac-Nle-c(Cys-D-Ala-His-D-2-Nal-Arg-Trp-Cys)-NH₂;
(SEQ ID NO: 66)
Ac-Nle-c(Cys-D-Ala-His-D-2-Nal-Arg-2-Nal-Cys)-NH₂;
(SEQ ID NO: 67)
Ac-Nle-c(Cys-D-Ala-His-D-2-Nal-Arg-1-Nal-Cys)-NH₂;
(SEQ ID NO: 70)
Ac-Nle-c(Cys-D-Ala-His-D-Phe-Arg-2-Nal-Cys)-NH₂;
(SEQ ID NO: 71)
Ac-Nle-c(Cys-D-Ala-His-D-Phe-Arg-1-Nal-Cys)-NH₂;
(SEQ ID NO: 72)
Ac-Nle-c(Cys-D-Ala-His-D-Phe-Arg-Bal-Cys)-NH₂;
(SEQ ID NO: 73)
Ac-Nle-c(Cys-D-Glu-His-D-Phe-Arg-Trp-Cys)-NH₂;
(SEQ ID NO: 74)
Ac-Nle-c(Asp-His-D-Phe-Arg-Trp-D-Ala-Lys)-NH₂;
(SEQ ID NO: 75)
Ac-Nle-c(Cys-D-Ala-His-D-2-Nal-Arg-Bal-Cys)-NH₂;
(SEQ ID NO: 76)
Ac-Nle-c(Pen-D-Ala-His-D-Phe-Arg-Trp-Cys)-NH₂;
(SEQ ID NO: 77)
Ac-Nle-c(Cys-D-Ala-His-D-Phe-Arg-Trp-Pen)-NH₂;
(SEQ ID NO: 78)
Ac-Nle-c(Pen-D-Ala-His-D-Phe-Arg-Trp-Pen)-NH₂;
(SEQ ID NO: 86)
Ac-Nle-c(Asp-D-Ala-His-D-Phe-Arg-Trp-Lys)-NH₂;
(SEQ ID NO: 87)
Ac-Nle-c(Asp-D-Ala-His-D-Phe-Arg-Bal-Lys)-NH₂;
(SEQ ID NO: 89)
Ac-Nle-c(Cys-D-Abu-His-D-Phe-Arg-Trp-Cys)-NH₂;
(SEQ ID NO: 90)
Ac-Nle-c(Cys-D-Val-His-D-Phe-Arg-Trp-Cys)-NH₂;
(SEQ ID NO: 91)
Ac-Nle-c(Cys-D-Ile-His-D-Phe-Arg-Trp-Cys)-NH₂;
(SEQ ID NO: 92)
Ac-Nle-c(Cys-D-Leu-His-D-Phe-Arg-Trp-Cys)-NH₂;
(SEQ ID NO: 93)
Ac-Nle-c(Cys-D-Tle-His-D-Phe-Arg-Trp-Cys)-NH₂;
(SEQ ID NO: 94)
Ac-Nle-c(Cys-D-Cha-His-D-Phe-Arg-Trp-Cys)-NH₂;
(SEQ ID NO: 95)
Ac-Nle-c(Pen-His-D-Phe-Arg-Trp-Gaba-Cys)-NH₂;
(SEQ ID NO: 96)
Ac-Nle-c(Cys-His-D-Phe-Arg-Trp-Gaba-Pen)-NH₂;
(SEQ ID NO: 97)
Ac-Nle-c(Pen-His-D-Phe-Arg-Trp-Gaba-Pen)-NH₂;
(SEQ ID NO: 106)
Ac-Nle-c(Cys-3-Pal-D-Phe-Arg-Trp-Gaba-Cys)-NH₂;
(SEQ ID NO: 108)
Ac-Nle-c(Cys-His-Phe-Arg-D-Trp-Gaba-Cys)-NH₂;
(SEQ ID NO: 109)
Ac-Nle-c(Asp-His-D-2-Nal-Arg-Trp-Ala-Lys)-NH₂;
(SEQ ID NO: 110)
Ac-Nle-c(Asp-His-D-2-Nal-Arg-Trp-β-Ala-Lys)-NH₂;
(SEQ ID NO: 111)
Ac-Nle-c(Cys-His-D-2-Nal-Arg-Trp-Gaba-Cys)-NH₂;
and
(SEQ ID NO: 112)
Ac-Nle-c(Cys-His-D-2-Nal-Arg-Trp-Ahx-Cys)-NH₂.

[0439] In some embodiments, the MC4R agonist is a compound of Formula (I-d):

[chemical structure]

[0440] or a pharmaceutically acceptable salt thereof, wherein:
[0441] A² is Cys;
[0442] A³ is deleted;
[0443] A⁴ is His;
[0444] A⁵ is D-Phe or D-(Et)Tyr;
[0445] A⁶ is Arg or hArg;
[0446] A⁷ is Trp or Bip;
[0447] A⁸ is Ala, β-Ala, or Gaba;
[0448] A⁹ is D-Cys; and
[0449] A¹⁰ is Thr.

[0450] In some embodiments, the compound of Formula (I-d) is selected from:

(SEQ ID NO: 4)
D-Phe-c(Cys-His-D-Phe-Arg-Trp-Ala-D-Cys)-Thr-NH₂;
(SEQ ID NO: 5)
D-Phe-c(Cys-His-D-Phe-Arg-Trp-β-Ala-D-Cys)-Thr-
NH₂;
(SEQ ID NO: 6)
D-Phe-c(Cys-His-D-Phe-Arg-Trp-Gaba-D-Cys)-Thr-NH₂;
(SEQ ID NO: 79)
D-Phe-c(Cys-His-D-Phe-hArg-Trp-β-Ala-D-Cys)-Thr-
NH₂;
(SEQ ID NO: 80)
D-Phe-c(Cys-His-D-(Et)Tyr-Arg-Trp-β-Ala-D-Cys)-
Thr-NH₂;
(SEQ ID NO: 81)
D-Phe-c(Cys-His-D-Phe-Arg-Bip-β-Ala-D-Cys)-Thr-
NH₂;
(SEQ ID NO: 82)
D-Phe-c(Cys-His-D-(Et)Tyr-hArg-Trp-β-Ala-D-Cys)-
Thr-NH₂;
(SEQ ID NO: 83)
D-Phe-c(Cys-His-D-Phe-hArg-Bip-β-Ala-D-Cys)-Thr-
NH₂;
and
(SEQ ID NO: 84)
D-Phe-c(Cys-His-D-(Et)Tyr-hArg-Bip-β-Ala-D-Cys)-
Thr-NH₂.

[0451] In some embodiments, the MC4R agonist is a compound of Formula (II):

[chemical structure]

or a pharmaceutically acceptable salt thereof, wherein:
[0452] X¹ is

[chemical structure]

### X² is

[chemical structure]

A¹ is Asp, Cys, D-Cys, Dab, Dap, Glu, Lys, Orn, Pen or D-Pen; A² is an L- or D-amino acid; A³ is H is, 2-Pal, 3-Pal, 4-Pal, (X¹, X², X³, X⁴, X⁵)Phe, Taz, 2-Thi or 3-Thi; A⁴ is D-Bal, D-1-Nal, D-2-Nal, D-Phe or D-(X¹, X², X³, X⁴, X⁵)Phe; A⁵ is Arg, hArg, Dab, Dap, Lys or Orn; A⁶ is Bal, 1-Nal, 2-Nal, (X¹, X², X³, X⁴, X⁵)Phe or Trp; A⁷ is Asp, Cys, D-Cys, Dab, Dap, Glu, Lys, Orn, Pen or D-Pen; Riis H, (C₁-C₁₀)alkyl or substituted (C₁-C₁₀)alkyl; R² and R³ each is, independently, H, (C₁-C₁₀)alkyl, (C₁-C₁₀)heteroalkyl, aryl(C₁-C₅)alkyl, substituted (C₁-C₁₀)alkyl, substituted (C₁-C₁₀)heteroalkyl or substituted aryl(C₁-C₅)alkyl or R² and R³ may be fused together form a cyclic moiety; R⁴ is OH, NH₂, CO₂H or C(O)NH₂; R⁵ and R⁶ each is, independently, H, (C₁-C₁₀)alkyl, (C₁-C₁₀)heteroalkyl, aryl(C₁-C₅)alkyl, substituted (C₁-C₁₀)alkyl, substituted (C₁-C₁₀)heteroalkyl or substituted aryl(C₁-C₅)alkyl or R⁵ and R⁶ may be fused together form a cyclic moiety; R⁷ and R⁸ each is, independently, H, (C₁-C₁₀)alkyl, (C₁-C₁₀)heteroalkyl, aryl(C₁-C₅)alkyl, substituted (C₁-C₁₀)alkyl, substituted (C₁-C₁₀)heteroalkyl or substituted aryl(C₁-C₅)alkyl; or R⁷ and R⁸ may be fused together form a cyclic moiety; R⁹ is H, (C₁-C₁₀)alkyl or substituted (C₁-C₁₀)alkyl; and n is, independently for each occurrence thereof, 0, 1, 2, 3, 4, 5, 6 or 7; or a pharmaceutically acceptable salt thereof.

[0453] In some embodiments of Formula (II), A¹ is Cys; A² is D-Ala, Asn, Asp, Gln, Glu or D-Phe; A³ is H is; A⁴ is D-2-Nal or D-Phe; A⁵ is Arg; A⁶ is Trp; and A⁷ is Cys or Pen; each of R′, R², R³, and R⁹ is, independently, H; R⁴ is C(O)NH₂; each of R⁵ and R⁶ is, independently, H, (C₁-C₁₀)heteroalkyl, substituted (C₁-C₁₀)alkyl or substituted (C₁-C₁₀)heteroalkyl or R⁵ and R⁶ may be fused together form a cyclic moiety; and each of R⁷ and R⁸ is, independently, H, (C₁-C₁₀)alkyl, (C₁-C₁₀)heteroalkyl, substituted (C₁-C₁₀)alkyl or substituted (C₁-C₁₀)heteroalkyl;

or pharmaceutically acceptable salts thereof.

[0454] In some embodiments, the compound of Formula (II) is selected from:

(SEQ ID NO: 148)
Hydantoin(C(O)-(Arg-Gly))-c(Cys-Glu-His-D-Phe-Arg-Trp-Cys)-NH₂;
(SEQ ID NO: 149)
Hydantoin(C(O)-(Nle-Gly))-c(Cys-Glu-His-D-Phe-Arg-Trp-Cys)-NH₂;
(SEQ ID NO: 150)
Hydantoin(C(O)-(Gly-Gly))-c(Cys-Glu-His-D-Phe-Arg-Trp-Cys)-NH₂;
(SEQ ID NO: 151)
Hydantoin(C(O)-(Nle-Gly))-c(Cys-D-Ala-His-D-Phe-Arg-Trp-Cys)-NH₂;
(SEQ ID NO: 152)
Hydantoin(C(O)-(Gly-Gly))-c(Cys-D-Ala-His-D-Phe-Arg-Trp-Cys)-NH₂;
(SEQ ID NO: 153)
Hydantoin(C(O)-(Nle-Gly))-c(Cys-D-Ala-His-D-Phe-Arg-Trp-Pen)-NH₂;
(SEQ ID NO: 154)
Hydantoin(C(O)-(Gly-Gly))-c(Cys-D-Ala-His-D-Phe-Arg-Trp-Pen)-NH₂;
(SEQ ID NO: 155)
Hydantoin(C(O)-(Ala-Gly))-c(Cys-D-Ala-His-D-Phe-Arg-Trp-Cys)-NH₂;
(SEQ ID NO: 156)
Hydantoin(C(O)-(D-Ala-Gly))-c(Cys-D-Ala-His-D-Phe-Arg-Trp-Cys)-NH₂;
(SEQ ID NO: 157)
Hydantoin(C(O)-(Aib-Gly))-c(Cys-D-Ala-His-D-Phe-Arg-Trp-Cys)-NH₂;
(SEQ ID NO: 158)
Hydantoin(C(O)-(Val-Gly))-c(Cys-D-Ala-His-D-Phe-Arg-Trp-Cys)-NH₂;
(SEQ ID NO: 159)
Hydantoin(C(O)-(Ile-Gly))-c(Cys-D-Ala-His-D-Phe-Arg-Trp-Cys)-NH₂;
(SEQ ID NO: 160)
Hydantoin(C(O)-(Leu-Gly))-c(Cys-D-Ala-His-D-Phe-Arg-Trp-Cys)-NH₂;
(SEQ ID NO: 161)
Hydantoin(C(O)-(Gly-Gly))-c(Cys-Glu-His-D-2-Nal-Arg-Trp-Cys)-NH₂;
(SEQ ID NO: 162)
Hydantoin(C(O)-(Nle-Gly))-c(Cys-Glu-His-D-2-Nal-Arg-Trp-Cys)-NH₂;
(SEQ ID NO: 163)
Hydantoin(C(O)-(D-Arg-Gly))-c(Cys-Glu-His-D-Phe-Arg-Trp-Cys)-NH₂;
(SEQ ID NO: 164)
Hydantoin(C(O)-(D-Arg-Gly))-c(Cys-D-Ala-His-D-Phe-Arg-Trp-Cys)-NH₂;
(SEQ ID NO: 165)
Hydantoin(C(O)-(Arg-Gly))-c(Cys-D-Ala-His-D-Phe-Arg-Trp-Cys)-NH₂;
(SEQ ID NO: 166)
Hydantoin(C(O)-(D-Arg-Gly))-c(Cys-D-Ala-His-D-2-Nal-Arg-Trp-Cys)-NH₂;
(SEQ ID NO: 167)
Hydantoin(C(O)-(Arg-Gly))-c(Cys-D-Ala-His-D-2-Nal-Arg-Trp-Cys)-NH₂;
(SEQ ID NO: 168)
Hydantoin(C(O)-(Ala-Nle))-c(Cys-Glu-His-D-Phe-Arg-Trp-Cys)-NH₂;
(SEQ ID NO: 169)
Hydantoin(C(O)-(Val-Nle))-c(Cys-Glu-His-D-Phe-Arg-Trp-Cys)-NH₂;
(SEQ ID NO: 170)
Hydantoin(C(O)-(Gly-Nle))-c(Cys-Glu-His-D-Phe-Arg-Trp-Cys)-NH₂;
(SEQ ID NO: 171)
Hydantoin(C(O)-(A6c-Nle))-c(Cys-D-Ala-His-D-Phe-Arg-Trp-Cys)-NH₂;
(SEQ ID NO: 172)
Hydantoin(C(O)-(Gly-Nle))-c(Cys-D-Ala-His-D-Phe-Arg-Trp-Cys)-NH₂;
(SEQ ID NO: 173)
Hydantoin(C(O)-(Ala-Nle))-c(Cys-D-Ala-His-D-Phe-Arg-Trp-Cys)-NH₂;
(SEQ ID NO: 174)
Hydantoin(C(O)-(D-Ala-Nle))-c(Cys-D-Ala-His-D-Phe-Arg-Trp-Cys)-NH₂;
(SEQ ID NO: 175)
Hydantoin(C(O)-(Val-Nle))-c(Cys-D-Ala-His-D-Phe-Arg-Trp-Cys)-NH₂;
(SEQ ID NO: 176)
Hydantoin(C(O)-(Leu-Nle))-c(Cys-D-Ala-His-D-Phe-Arg-Trp-Cys)-NH₂;
(SEQ ID NO: 177)
Hydantoin(C(O)-(Cha-Nle))-c(Cys-D-Ala-His-D-Phe-Arg-Trp-Cys)-NH₂;
(SEQ ID NO: 178)
Hydantoin(C(O)-(Aib-Nle))-c(Cys-D-Ala-His-D-Phe-Arg-Trp-Cys)-NH₂;
(SEQ ID NO: 179)
Hydantoin(C(O)-(Gly-Arg))-c(Cys-Glu-His-D-Phe-Arg-Trp-Cys)-NH₂;
(SEQ ID NO: 180)
Hydantoin(C(O)-(Gly-Arg))-c(Cys-Glu-His-D-2-Nal-Arg-Trp-Cys)-NH₂;
(SEQ ID NO: 181)
Hydantoin(C(O)-(Gly-Arg))-c(Cys-D-Ala-His-D-Phe-Arg-Trp-Cys)-NH₂;
(SEQ ID NO: 182)
Hydantoin(C(O)-(Gly-Arg))-c(Cys-D-Ala-His-D-2-Nal-Arg-Trp-Cys)-NH₂;
(SEQ ID NO: 183)
Hydantoin(C(O)-(Gly-D-Arg))-c(Cys-Glu-His-D-Phe-Arg-Trp-Cys)-NH₂;
(SEQ ID NO: 184)
Hydantoin(C(O)-(Gly-D-Arg))-c(Cys-D-Ala-His-D-Phe-Arg-Trp-Cys)-NH₂;
(SEQ ID NO: 185)
Hydantoin(C(O)-(Gly-D-Arg))-c(Cys-D-Ala-His-D-2-Nal-Arg-Trp-Cys)-NH2;
and
(SEQ ID NO: 186)
Hydantoin(C(O)-(Nle-Ala))-c(Cys-Glu-His-D-Phe-Arg-Trp-Cys)-NH₂,

or a pharmaceutically acceptable salt thereof.

[0455] In some embodiments, the compound of Formula (II) is described in WO2008/147556 or International Patent Application Number PCT/US08/06675, each of which is incorporated herein by reference in its entirety.

[0456] In embodiments, the compound of Formula (II) is hydantoin(C(O)-(Arg-Gly))-c(Cys-Glu-His-D-Phe-Arg-Trp-Cys)-NH₂ (SEQ ID NO: 148) or a pharmaceutically acceptable salt thereof, also known as RM-511. The structure of hydantoin(C(O)-(Arg-Gly))-c(Cys-Glu-His-D-Phe-Arg-Trp-Cys)-NH₂ (SEQ ID NO:148) is shown below:

[chemical structure]

[0457] In some embodiments, the MC4R agonist is a compound of Formula (III):

[chemical structure]

or a pharmaceutically acceptable salt thereof, wherein X is selected from the group consisting of —CH₂—S—S—CH₂—, —C(CH₃)₂—S—S—CH₂—, —CH₂—S—S—C(CH₃)₂—, —C(CH₃)₂—S—S—C(CH₃)₂—, —(CH₂)₂—S—S—CH₂—, —CH₂—S—S—(CH₂)₂—, —(CH₂)₂—S—S—(CH₂)₂—, —C(CH₃)₂—S—S—(CH₂)₂—, —(CH₂)₂—S—S—C(CH₃)₂—, —(CH₂)ₜ—C(O)—NR⁸—(CH₂)ᵣ— and —(CH₂)ᵣ—NR⁸—C(O)—(CH₂)ₜ—; R² each is, independently, H, (C₁-C₁₀)alkyl or substituted (C₁-C₁₀)alkyl; R³ is —OH or —NH₂; R⁴ and R⁵ each is, independently, H, (C₁-C₁₀)alkyl or substituted (C₁-C₁₀)alkyl; X¹ is

[chemical structure]

A¹ is H is, 2-Pal, 3-Pal, 4-Pal, (X¹, X², X³, X⁴, X⁵)Phe, Taz, 2-Thi, 3-Thi or is deleted; A² is D-Bal, D-1-Nal, D-2-Nal, D-Phe or D-(X¹, X², X³, X⁴, X⁵)Phe; A³ is Arg, hArg, Dab, Dap, Lys or Orn; A⁴ is Bal, 1-Nal, 2-Nal, (X¹, X², X³, X⁴, X⁵)Phe or Trp; R⁶ and R⁷ each is, independently for each occurrence thereof, H, (C₁-C₁₀)heteroalkyl, aryl(C₁-C₅)alkyl, substituted (C₁-C₁₀)alkyl, substituted (C₁-C₁₀)heteroalkyl or substituted aryl(C₁-C₅)alkyl provided that R⁶ and R⁷ may be joined together to form a ring; R⁸ is H, (C₁-C₁₀)alkyl or substituted (C₁-C₁₀)alkyl; r is, independently for each occurrence thereof, 1, 2, 3, 4 or 5; and t is, independently for each occurrence thereof, 1 or 2.

[0458] Compounds according to the foregoing formula can include compounds wherein X¹ is selected from the group consisting of:

[chemical structure]

[0459] Compounds of Formula (III) are disclosed in International Patent Publication WO 2008/147556 or International Patent Application Number PCT/US08/06675, each of which is incorporated herein by reference in its entirety.

[0460] In some embodiments, the compound of Formula (III) is selected from:

(SEQ ID NO: 187)
c[Hydantoin(C(O)-(Cys-D-Ala))-His-D-Phe-Arg-Trp-Cys]-NH₂;
(SEQ ID NO: 188)
c[Hydantoin(C(O)-(hCys-D-Ala))-His-D-Phe-Arg-Trp-Cys]-NH₂;
(SEQ ID NO: 189)
c[Hydantoin(C(O)-(Cys-D-Ala))-His-D-2-Nal-Arg-Trp-Cys]-NH₂;
(SEQ ID NO: 190)
c[Hydantoin(C(O)-(hCys-D-Ala))-His-D-2-Nal-Arg-Trp-Cys]-NH₂;
(SEQ ID NO: 191)
c[Hydantoin(C(O)-(Asp-D-Ala))-His-D-Phe-Arg-Trp-Lys]-NH₂;
(SEQ ID NO: 192)
c[Hydantoin(C(O)-(Asp-D-Ala))-His-D-Phe-Arg-Trp-Orn]-NH₂;
(SEQ ID NO: 193)
c[Hydantoin(C(O)-(Asp-D-Ala))-His-D-Phe-Arg-Trp-Dab]-NH₂;
(SEQ ID NO: 194)
c[Hydantoin(C(O)-(Asp-D-Ala))-His-D-Phe-Arg-Trp-Dap]-NH₂;
(SEQ ID NO: 195)
c[Hydantoin(C(O)-(Asp-His))-D-2-Nal-Arg-Trp-Lys]-NH₂;
(SEQ ID NO: 196)
c[Hydantoin(C(O)-(Asp-His))-D-Phe-Arg-Trp-Lys]-NH₂;
(SEQ ID NO: 197)
c[Hydantoin(C(O)-(Asp-A3c))-D-Phe-Arg-Trp-Lys]-NH₂;
(SEQ ID NO: 198)
c[Hydantoin(C(O)-(Asp-A5c))-D-Phe-Arg-Trp-Lys]-NH₂;
(SEQ ID NO: 199)
c[Hydantoin(C(O)-(Asp-A6c))-D-Phe-Arg-Trp-Lys]-NH₂;
(SEQ ID NO: 200)
c[Hydantoin(C(O)-(Asp-A3c))-D-2-Nal-Arg-Trp-Lys]-NH₂;
(SEQ ID NO: 201)
c[Hydantoin(C(O)-(Asp-A5c))-D-2-Nal-Arg-Trp-Lys]-NH₂;
(SEQ ID NO: 202)
c[Hydantoin(C(O)-(Asp-A6c))-D-2-Nal-Arg-Trp-Lys]-NH₂;
(SEQ ID NO: 203)
c[Hydantoin(C(O)-(Asp-Aic))-D-Phe-Arg-Trp-Lys]-NH₂;
(SEQ ID NO: 204)
c[Hydantoin(C(O)-(Asp-Apc))-D-Phe-Arg-Trp-Lys]-NH₂;
(SEQ ID NO: 205)
c[Hydantoin(C(O)-(Asp-Aic))-D-2-Nal-Arg-Trp-Lys]-NH₂;
(SEQ ID NO: 206)
c[Hydantoin(C(O)-(Asp-Apc))-D-2-Nal-Arg-Trp-Lys]-NH₂;
(SEQ ID NO: 207)
c[Hydantoin(C(O)-(Glu-D-Ala))-His-D-Phe-Arg-Trp-Orn]-NH₂;
(SEQ ID NO: 208)
c[Hydantoin(C(O)-(Glu-D-Ala))-His-D-Phe-Arg-Trp-Dab]-NH₂;
(SEQ ID NO: 209)
c[Hydantoin(C(O)-(Glu-D-Ala))-His-D-Phe-Arg-Trp-Dap]-NH₂;
(SEQ ID NO: 210)
c[Hydantoin(C(O)-(Glu-D-Ala))-His-D-Phe-Arg-Trp-Lys]-NH₂;
(SEQ ID NO: 211)
c[Hydantoin(C(O)-(Glu-His))-D-Phe-Arg-Trp-Dap]-NH₂;
and
(SEQ ID NO: 212)
c[Hydantoin(C(O)-(Glu-His))-D-Phe-Arg-Trp-Lys]-NH₂,

or a pharmaceutically acceptable salt thereof.

[0461] In some embodiments, the MC4R agonist is a compound of Formula (IV):

[chemical structure]

or a pharmaceutically acceptable salt thereof, wherein A¹ is Nle or deleted; A² is Cys or Asp; A³ is Glu or D-Ala; A⁴ is His; A⁵ is D-Phe; A⁶ is Arg; A⁷ is Trp, 2-Nal or Bal; A⁸ is Gly, Ala, D-Ala, 3-Ala, Gaba or Apn; A⁹ is Cys or Lys; each of R² and R³ is independently selected from the group consisting of H or (C₁-C₆)acyl.

[0462] In exemplary embodiments of Formula (IV): (I) when R² is (C₁-C₆)acyl, then R³ is H; and (II) when A² is Cys, then A⁹ is Cys.

[0463] Exemplary MC4R agonists of Formula (IV) are disclosed in International Patent Application Publication Number WO 2007/008704, which is incorporated herein by reference in its entirety.

[0464] In some embodiments, the compound of Formula (IV) is selected from:

(SEQ ID NO: 213)
Ac-Nle-c(Cys-D-Ala-His-D-Phe-Arg-Trp-Gly-Cys)-NH₂;
(SEQ ID NO: 214)
Ac-Nle-c(Cys-D-Ala-His-D-Phe-Arg-Trp-D-Ala-Cys)-NH₂;
(SEQ ID NO: 215)
Ac-Nle-c(Cys-D-Ala-His-D-Phe-Arg-Trp-β-Ala-Cys)-NH₂;
(SEQ ID NO: 216)
Ac-Nle-c(Cys-D-Ala-His-D-Phe-Arg-Trp-Gaba-Cys)-NH₂;
(SEQ ID NO: 217)
Ac-Nle-c(Cys-D-Ala-His-D-Phe-Arg-Trp-Apn-Cys)-NH₂;
(SEQ ID NO: 218)
Ac-c(Cys-Glu-His-D-Phe-Arg-Trp-Ala-Cys)-NH₂;
(SEQ ID NO: 219)
Ac-c(Cys-Glu-His-D-Phe-Arg-2-Nal-Ala-Cys)-NH₂;
(SEQ ID NO: 220)
Ac-c(Cys-D-Ala-His-D-Phe-Arg-Trp-Ala-Cys)-NH₂;
(SEQ ID NO: 221)
Ac-c(Cys-D-Ala-His-D-Phe-Arg-2-Nal-Ala-Cys)-NH₂;
(SEQ ID NO: 222)
Ac-Nle-c(Cys-D-Ala-His-D-Phe-Arg-Trp-Ala-Cys)-NH₂,
and
(SEQ ID NO: 223)
Ac-Nle-c(Asp-D-Ala-His-D-Phe-Arg-Bal-Ala-Lys)-NH₂,

or a pharmaceutically acceptable salt thereof.

[0465] In some embodiments, the MC4R agonist is a compound of Formula (V):

[chemical structure]

or a pharmaceutically acceptable salt thereof: B¹ is a peptide moiety which contains 5, 6, 7, 8, 9, 10, 11, 12, 13, 14, or 15 amino acids, wherein at least 5 amino acids are independently selected from the group consisting of L-Arg, D-Arg, L-hArg and D-hArg, or B¹ is optionally deleted; A¹ is Acc, HN—(CH₂)ₘ—C(O), L- or D-amino acid or deleted; A² is Cys, D-Cys, hCys, D-hCys, Pen, D-Pen, Asp or Glu; A³ is Gly, Glu, Ala, β-Ala, Gaba, Aib, D-amino acid or deleted; A⁴ is H is, 2-Pal, 3-Pal, 4-Pal, Taz, 2-Thi, 3-Thi or (X¹, X², X³, X⁴, X⁵)Phe; A⁵ is D-Phe, D-1-Nal, D-2-Nal, D-Trp, D-Bal, D-(X¹, X², X³, X⁴, X⁵)Phe, D-(Et)Tyr, D-Dip, D-Bip or D-Bpa; A⁶ is Arg, hArg, Dab, Dap, Lys, Orn or HN—CH((CH₂)ₙ—N(R⁴R5))—C(O); A⁷ is Trp, 1-Nal, 2-Nal, Bal, Bip, Dip, Bpa, D-Trp, D-1-Nal, D-2-Nal, D-Bal, D-Bip, D-Dip or D-Bpa; A⁸ is Gly, D-Ala, Acc, Ala, 3-Ala, Gaba, Apn, Ahx, Aha, HN—(CH₂)ₛ—C(O) or deleted; A⁹ is Cys, D-Cys, hCys, D-hCys, Pen, D-Pen, Dab, Dap, Orn or Lys; A¹⁰ is Acc, HN—(CH₂)ᵣ—C(O), Pro, hPro, 3-Hyp, 4-Hyp, Thr, an L- or D-amino acid or deleted; A¹¹ is Pro, hPro, 3-Hyp, 4-Hyp or deleted; A¹² is Lys, Dab, Dap, Arg, hArg or deleted; A¹³ is Asp, Glu or deleted; B² is a peptide moiety containing 1, 2, 3, 4, or 5 amino acids or deleted, B³ is a peptide moiety which contains 5, 6, 7, 8, 9, 10, 11, 12, 13, 14 or 15 amino acids wherein at least 5 amino acids are independently selected from the group consisting of L-Arg, D-Arg, L-hArg and D-hArg, or is deleted; R¹ is OH or NH₂; R² and R³ each is, independently for each occurrence, selected from the group consisting of H, (C₁-C₃₀)alkyl, (C₁-C₃₀)heteroalkyl, (C₁-C₃₀)acyl, (C₂-C₃₀)alkenyl, (C₂-C₃₀)alkynyl, aryl(C₁-C₃₀)alkyl, aryl(C₁-C₃₀)acyl, substituted (C₁-C₃₀)alkyl, substituted (C₁-C₃₀)heteroalkyl, substituted (C₁-C₃₀)acyl, substituted (C₂-C₃₀)alkenyl, substituted (C₂-C₃₀)alkynyl, substituted aryl(C₁-C₃₀)alkyl and substituted aryl(C₁-C₃₀)acyl; R⁴ and R⁵ each is, independently for each occurrence, H, (C₁-C₄₀)alkyl, (C₁-C₄₀)heteroalkyl, (C₁-C₄₀)acyl, (C₂-C₄₀)alkenyl, (C₂-C₄₀)alkynyl, aryl(C₁-C₄₀)alkyl, aryl(C₁-C₄₀)acyl, substituted (C₁-C₄₀)alkyl, substituted (C₁-C₄₀)heteroalkyl, substituted (C₁-C₄₀)acyl, substituted (C₂-C₄₀)alkenyl, substituted (C₂-C₄₀)alkynyl, substituted aryl(C₁-C₄₀)alkyl, substituted aryl(C₁-C₄₀)acyl, (C₁-C₄₀)alkylsulfonyl or C(NH)—NH₂; n is, independently for each occurrence, 1, 2, 3, 4 or 5; m is, independently for each occurrence, 1, 2, 3, 4, 5, 6 or 7; s is, independently for each occurrence, 1, 2, 3, 4, 5, 6 or 7; t is, independently for each occurrence, 1, 2, 3, 4, 5, 6 or 7; X¹, X², X³, X⁴ and X⁵ each is, independently for each occurrence, H, F, Cl, Br, I, —(C₁-C₁₀) alkyl, substituted (C₁-C₁₀) alkyl, (C₂-C₁₀) alkenyl, substituted (C₂-C₁₀) alkenyl, (C₂-C₁₀) alkynyl, substituted (C₂-C₁₀) alkynyl, aryl, substituted aryl, OH, NH₂, NO₂ or CN.

[0466] In some embodiments of Formula (V):
[0467] (I) when R⁴ is (C₁-C₄₀)acyl, aryl(C₁-C₄₀)acyl, substituted (C₁-C₄₀)acyl, substituted aryl(C₁-C₄₀)acyl, (C₁-C₄₀)alkylsulfonyl or C(NH)—NH₂, then R⁵ is H, (C₁-C₄₀)alkyl, (C₁-C₄₀)heteroalkyl, (C₂-C₄₀)alkenyl, (C₂-C₄₀)alkynyl, aryl(C₁-C₄₀)alkyl, substituted (C₁-C₄₀)alkyl, substituted (C₁-C₄₀)heteroalkyl, substituted (C₂-C₄₀)alkenyl, substituted (C₂-C₄₀)alkynyl or substituted aryl(C₁-C₄₀)alkyl;
[0468] (II) when R² is (C₁-C₃₀)acyl, aryl(C₁-C₃₀)acyl, substituted (C₁-C₃₀)acyl or substituted aryl (C₁-C₃₀)acyl, then R³ is H, (C₁-C₃₀)alkyl, (C₁-C₃₀)heteroalkyl, (C₂-C₃₀)alkenyl, (C₂-C₃₀)alkynyl, aryl(C₁-C₃₀)alkyl, substituted (C₁-C₃₀)alkyl, substituted (C₁-C₃₀)heteroalkyl, substituted (C₂-C₃₀)alkenyl, substituted (C₂-C₃₀)alkynyl or substituted aryl(C₁-C₃₀)alkyl;
[0469] (III) neither B¹ nor B² contains one or more of the following amino acid sequences: Arg-(Lys)₂-(Arg)₂-Gln-(Arg)₃, Tyr-Ala-Arg-Lys-Ala-(Arg)₂-Gln-Ala-(Arg)₂, Tyr-Ala-Arg-(Ala)₂-(Arg)₂-(Ala)₂-(Arg)₂, Tyr-Ala-(Arg)₉, Tyr-(Ala)₃-(Arg)₇, Tyr-Ala-Arg-Ala-Pro-(Arg)₂-Ala-(Arg)₃ or Tyr-Ala-Arg-Ala-Pro-(Arg)₂-Pro-(Arg)₂;
[0470] (IV) either B¹ or B² or both must be present in said compound;
[0471] (V) when A² is Cys, D-Cys, hCys, D-hCys, Pen or D-Pen, then A⁹ is Cys, D-Cys, hCys, D-hCys, Pen or D-Pen; and
[0472] (VI) when A² is Asp or Glu, then A⁹ is Dab, Dap, Orn or Lys.

[0473] In some embodiments of Formula (V):
[0474] B¹ is Arg-Lys-Gln-Lys-(Arg)₅, Arg-(Lys)₂-Arg-Gln-(Arg)₄, Arg-(Lys)₂-(Arg)₃-Gln-(Arg)₂, Arg-(Lys)₂-(Arg)₄-Gln-Arg, Arg-(Lys)₂-(Arg)₅-Gln, Arg-(Lys)₂-Gln-(Arg)₅, Arg-Gln-(Lys)₂-(Arg)₅, Arg-Gln-(Arg)₇, Arg-Gln-(Arg)s, (Arg)₂-Gln-(Arg)₆, (Arg)₂-Gln-(Arg)₇, (Arg)₃-Gln-(Arg)₅, (Arg)₃-Gln-(Arg)₆, (Arg)₄-Gln-(Arg)₄, (Arg)₄-Gln-(Arg)₅, (Arg)₅, (Arg)₅-Gln-(Arg)₃, (Arg)s-Gln-(Arg)₄, (Arg)₆, (Arg)₆-Gln-(Arg)₃, (Arg)₇, (Arg)₇-Gln-(Arg)₂, (Arg)₈, (Arg)ₛ-Gln-Arg, (Arg)₉, (Arg)₉-Gln, (D-Arg)ₛ, (D-Arg)₆, (D-Arg)₇, (D-Arg)₈, (D-Arg)₉, Gln-Arg-(Lys)₂-(Arg)ₛ, Gln-(Arg)ₛ, Gln-(Arg)₉, Tyr-Gly-Arg-(Lys)₂-(Arg)₂-Gln-(Arg)₃, Tyr-Gly-Arg-(Lys)₂-(Arg)₂-Gln-(Arg)₃-Doc; or deleted;
[0475] B² is β-Ala, β-Ala-Gly, β-Ala-Tyr, β-Ala-Tyr-Gly, (β-Ala)₂, (β-Ala)₂-Gly, (β-Ala)₂-Tyr, (β-Ala)₂-Tyr-Gly, Doc, Doc-Gly, Doc-Tyr, Doc-Tyr-Gly, (DoC)₂, (Doc)₂-Gly, (DoC)₂-Tyr, Doc)₂-Tyr-Gly, or deleted;
[0476] B³ is Arg-Lys-Gln-Lys-(Arg)₅, Arg-Lys-(Arg)₃-Gln-(Arg)₃, Arg-(Lys)₂-Arg-Gln-(Arg)₄, Arg-(Lys)₂-Gln-(Arg)ₛ, Arg-(Lys)₂-(Arg)₂-Gln-(Arg)₃, Arg-(Lys)₂-(Arg)₃-Gln-(Arg)₂, Arg-(Lys)₂-(Arg)₄-Gln-Arg, Arg-(Lys)₂-(Arg)ₛ-Gln, Arg-Gln-(Lys)₂-(Arg)ₛ, Arg-Gln-(Arg)₇, Arg-Gln-(Arg)ₛ, (Arg)₂-Lys-(Arg)₂-Gln-(Arg)₃, (Arg)₂-Gln-(Arg)₆, (Arg)₂-Gln-(Arg)₇, (Arg)₃-Gln-(Arg)ₛ, (Arg)₃-Gln-(Arg)₆, (Arg)₄-Gln-(Arg)₄, (Arg)₄-Gln-(Arg)₅, (Arg)₅, (Arg)ₛ-Gln-(Arg)₃, (Arg)ₛ-Gln-(Arg)₄, (Arg)₆, (Arg)₆-Gln-(Arg)₃, (Arg)₇, (Arg)₇-Gln-(Arg)₂, (Arg)₈, (Arg)ₛ-Gln-Arg, (Arg)₉, (Arg)₉-Gln, (D-Arg)₅, (D-Arg)₆, (D-Arg)₇, (D-Arg)₈, (D-Arg)₉, Gln-Arg-(Lys)₂-(Arg)₅, Gln-(Arg)₈, Gln-(Arg)₉, or deleted;
[0477] A¹ is A6c, Cha, hCha, Chg, D-Chg, hChg, Gaba, hLeu, Met, β-hMet, D-2-Nal, Nip, Nle, Oic, Phe, D-Phe, hPhe, hPro, or deleted;
[0478] A² is Cys;
[0479] A³ is D-Abu, Aib, Ala, β-Ala, D-Ala, D-Cha, Gaba, Glu, Gly, D-Ile, D-Leu, D-Met, D-Nle, D-Phe, D-Tle, D-Trp, D-Tyr, D-Val, or deleted;
[0480] A⁴ is H;
[0481] A⁵ is D-Bal, D-1-Nal, D-2-Nal, D-Phe, D-(X¹, X², X³, X⁴, X⁵)Phe, D-Trp, or D-(Et)Tyr;
[0482] A⁶ is Arg or hArg;
[0483] A⁷ is Bal, Bip, 1-Nal, 2-Nal, Trp, or D-Trp;
[0484] A⁸ is A5c, A6c, Aha, Ahx, Ala, β-Ala, Apn, Gaba, Gly, or deleted;
[0485] A⁹ is Cys, D-Cys, hCys, D-hCys, Lys, Pen, or D-Pen;
[0486] A¹⁰ is Pro, Thr or deleted;
[0487] A¹¹ is Pro or deleted;
[0488] A¹² is Arg, Lys, or deleted;
[0489] A¹³ is Asp or deleted;
[0490] each of R² and R³ is, independently, H or acyl;
[0491] or pharmaceutically acceptable salts thereof.

[0492] In some embodiments the compound of Formula V is selected from:

(SEQ ID NO: 224)
Tyr-Gly-Arg-(Lys)₂-(Arg)₂-Gln-(Arg)₃-Nle-c(Asp-His-D-2-Nal-Arg-Trp-
Lys)-NH₂;
(SEQ ID NO: 225)
Tyr-Gly-Arg-(Lys)₂-(Arg)₂-Gln-(Arg)₃-Doc-Nle-c(Asp-His-D-2-Nal-
Arg-Trp-Lys)-NH₂;
(SEQ ID NO: 226)
Nle-c(Asp-His-D-2-Nal-Arg-Trp-Lys)-β-Ala-Tyr-Gly-Arg-(Lys)₂-(Arg)₂-
Gln-(Arg)3-NH₂;
(SEQ ID NO: 227)
Ac-Nle-c(Asp-His-D-2-Nal-Arg-Trp-Lys)-β-Ala-Tyr-Gly-Arg-(Lys)₂-
(Arg)₂-Gln-(Arg)₃-NH₂;
(SEQ ID NO: 228)
Nle-c(Asp-His-D-2-Nal-Arg-Trp-Lys)-(Doc)₂-Tyr-Gly-Arg-(Lys)₂-
(Arg)₂-Gln-(Arg)₃-NH₂;
(SEQ ID NO: 229)
Ac-Nle-c(Asp-His-D-2-Nal-Arg-Trp-Lys)-(Pro)₂-Lys-Asp-Tyr-Gly-Arg-
(Lys)₂-(Arg)₂-Gln-(Arg)₃-NH₂;
(SEQ ID NO: 230)
Ac-c(Cys-Glu-His-D-2-Nal-Arg-Trp-Gly-Cys)-(Pro)₂-Lys-Asp-Tyr-Gly-
Arg-(Lys)₂-(Arg)₂-Gln-(Arg)₃-NH₂;
(SEQ ID NO: 231)
Ac-Nle-c(Asp-His-D-2-Nal-Arg-Trp-Lys)-(β-Ala)₂-Tyr-Gly-Arg-(Lys)₂-
(Arg)₂-Gln-(Arg)₃-NH₂;
(SEQ ID NO: 232)
Ac-Nle-c(Asp-His-D-2-Nal-Arg-Trp-Lys)-(Pro)₂-Lys-Asp-Doc-Tyr-Gly-
Arg-(Lys)₂-(Arg)₂-Gln-(Arg)₃-NH₂;
(SEQ ID NO: 233)
Ac-c(Cys-Glu-His-D-2-Nal-Arg-Trp-Gly-Cys)-(Pro)₂-Lys-Asp-Doc-Tyr-
Gly-Arg-(Lys)₂-(Arg)₂-Gln-(Arg)₃-NH₂;
(SEQ ID NO: 234)
Ac-c(Cys-Glu-His-D-2-Nal-Arg-Trp-Ala-Cys)-(Pro)₂-Lys-Asp-β-Ala-
Tyr-Gly-Arg-(Lys)₂-(Arg)₂-Gln-(Arg)₃-NH₂;
(SEQ ID NO: 235)
Ac-c(Cys-Glu-His-D-2-Nal-Arg-Trp-Ala-Cys)-(Pro)₂-Lys-Asp-Doc-Tyr-
Gly-Arg-(Lys)₂-(Arg)₂-Gln-(Arg)₃-NH₂;
(SEQ ID NO: 236)
Ac-Nle-c(Asp-His-D-2-Nal-Arg-Trp-Lys)-(Doc)₂-Tyr-Gly-Arg-(Lys)₂-
(Arg)₂-Gln-(Arg)₃-NH₂;
(SEQ ID NO: 237)
Ac-c(Cys-Glu-His-D-2-Nal-Arg-2-Nal-Ala-Cys)-(Pro)₂-Lys-Asp-β-Ala-
Tyr-Gly-Arg-(Lys)₂-(Arg)₂-Gln-(Arg)₃-NH₂;
(SEQ ID NO: 238)
Ac-c(Cys-Glu-His-D-2-Nal-Arg-Bal-Ala-Cys)-(Pro)₂-Lys-Asp-β-Ala-
(Arg)₅-Gln-(Arg)₃-NH₂;
(SEQ ID NO: 239)
Ac-c(Cys-Glu-His-D-2-Nal-Arg-Bal-Ala-Cys)-(Pro)₂-Lys-Asp-β-Ala-
Gly-(Arg)₅-Gln-(Arg)₃-NH₂;
(SEQ ID NO: 240)
Ac-c(Cys-Glu-His-D-2-Nal-Arg-Bal-Ala-Cys)-(Pro)₂-Lys-Asp-β-Ala-
Tyr-Gly-(Arg)₅-Gln-(Arg)₃-NH₂;
(SEQ ID NO: 241)
Ac-c(Cys-Glu-His-D-2-Nal-Arg-Trp-Ala-Cys)-(Pro)₂-Lys-Asp-β-Ala-
Tyr-Gly-Arg-(Lys)₂-Arg-Gln-(Arg)₄-NH₂;
(SEQ ID NO: 242)
Ac-c(Cys-Glu-His-D-2-Nal-Arg-Trp-Ala-Cys)-(Pro)₂-Lys-Asp-β-Ala-
Tyr-Gly-Arg-(Lys)₂₋Gln-(Arg)₅-NH₂;
(SEQ ID NO: 243)
Ac-c(Cys-Glu-His-D-2-Nal-Arg-Trp-Ala-Cys)-(Pro)₂-Lys-Asp-β-Ala-
Tyr-Gly-Arg-Lys-Gln-Lys-(Arg)₅-NH₂;
(SEQ ID NO: 244)
Ac-c(Cys-Glu-His-D-2-Nal-Arg-Trp-Ala-Cys)-(Pro)₂-Lys-Asp-β-Ala-
Tyr-Gly-Arg-(Lys)₂-(Arg)₄-Gln-Arg-NH₂;
(SEQ ID NO: 245)
Ac-c(Cys-Glu-His-D-2-Nal-Arg-Bal-Ala-Cys)-(Pro)₂-Lys-Asp-β-Ala-
Tyr-Aib-Arg-(Lys)₂-(Arg)₂-Gln-(Arg)₃-NH₂;
(SEQ ID NO: 246)
Ac-c(Cys-Glu-His-D-2-Nal-Arg-1-Nal-Ala-Cys)-(Pro)₂-Arg-Asp-β-Ala-
(Arg)₅-Gln-(Arg)₃-NH₂;
(SEQ ID NO: 247)
Ac-c(Cys-Glu-His-D-2-Nal-Arg-1-Nal-Ala-Cys)-(Pro)₂-Lys-Asp-β-Ala-
(Arg)₅-Gln-(Arg)₃-NH₂;
(SEQ ID NO: 248)
Ac-c(Cys-Glu-His-D-2-Nal-Arg-1-Nal-Ala-Cys)-(Pro)₂-Lys-Asp-β-Ala-
(Arg)₆-Gln-(Arg)₃-NH₂;
(SEQ ID NO: 249)
Ac-c(Cys-Glu-His-D-2-Nal-Arg-2-Nal-Ala-Cys)-(Pro)₂-Arg-Asp-β-Ala-
(Arg)₅-Gln-(Arg)₃-NH₂;
(SEQ ID NO: 250)
Ac-c(Cys-Glu-His-D-2-Nal-Arg-2-Nal-Ala-Cys)-(Pro)₂-Lys-Asp-β-Ala-
(Arg)₅-Gln-(Arg)₃-NH₂;
(SEQ ID NO: 251)
Ac-c(Cys-Glu-His-D-2-Nal-Arg-2-Nal-Ala-Cys)-(Pro)₂-Lys-Asp-β-Ala-
(Arg)₆-Gln-(Arg)₃-NH₂;
(SEQ ID NO: 252)
Ac-c(Cys-Glu-His-D-2-Nal-Arg-Bal-Ala-Cys)-(Pro)₂-Arg-Asp-β-Ala-
(Arg)₆-Gln-(Arg)₃-NH₂;
(SEQ ID NO: 253)
Ac-c(Cys-Glu-His-D-2-Nal-Arg-Bal-Ala-Cys)-(Pro)₂-Arg-Asp-β-Ala-
(Arg)₅-Gln-(Arg)₃-NH₂;
(SEQ ID NO: 254)
Ac-c(Cys-Glu-His-D-2-Nal-Arg-Bal-Ala-Cys)-(Pro)₂-Lys-Asp-β-Ala-
(Arg)₆-Gln-(Arg)₃-NH₂;
(SEQ ID NO: 255)
Ac-c(Cys-Glu-His-D-2-Nal-Arg-Trp-Ala-Cys)-(Pro)₂-Lys-Asp-β-Ala-
Tyr-Gly-Arg-(Lys)₂-(Arg)₃-Gln-(Arg)₂-NH₂;
(SEQ ID NO: 256)
Ac-c(Cys-Glu-His-D-2-Nal-Arg-Trp-Ala-Cys)-(Pro)₂-Lys-Asp-β-Ala-
Tyr-Gly-Arg-Gln-(Lys)₂-(Arg)₅-NH₂;
(SEQ ID NO: 257)
Ac-c(Cys-Glu-His-D-2-Nal-Arg-Trp-Ala-Cys)-(Pro)₂-Lys-Asp-β-Ala-
Tyr-Gly-Arg-(Lys)₂-(Arg)₅-Gln-NH₂;
(SEQ ID NO: 258)
Ac-c(Cys-Glu-His-D-2-Nal-Arg-1-Nal-Ala-Cys)-(Pro)₂-Lys-Asp-β-Ala-
Tyr-Gly-Arg-(Lys)₂-(Arg)₂-Gln-(Arg)₃-NH₂;
(SEQ ID NO: 259)
Ac-c(Cys-Glu-His-D-2-Nal-Arg-Bal-Ala-Cys)-(Pro)₂-Lys-Asp-β-Ala-
Tyr-Gly-Arg-(Lys)₂-(Arg)₂-Gln-(Arg)₃-NH₂;
(SEQ ID NO: 260)
Ac-c(Cys-Glu-His-D-2-Nal-Arg-1-Nal-Ala-Cys)-(Pro)₂-Lys-Asp-β-Ala-
(Arg)₂-Lys-(Arg)₂-Gln-(Arg)₃-NH₂;
(SEQ ID NO: 261)
Ac-c(Cys-Glu-His-D-2-Nal-Arg-1-Nal-Ala-Cys)-(Pro)₂-Lys-Asp-β-Ala-
Arg-Lys-(Arg)₃-Gln-(Arg)₃-NH₂;
(SEQ ID NO: 262)
Ac-c(Cys-Glu-His-D-2-Nal-Arg-2-Nal-Ala-Cys)-(Pro)₂-Lys-Asp-β-Ala-
(Arg)₂-Lys-(Arg)₂-Gln-(Arg)₃-NH₂;
(SEQ ID NO: 263)
Ac-c(Cys-Glu-His-D-2-Nal-Arg-2-Nal-Ala-Cys)-(Pro)₂-Lys-Asp-β-Ala-
Tyr-Gly-(Arg)2-Lys-(Arg)₂-Gln-(Arg)₃-NH₂;
(SEQ ID NO: 264)
Ac-c(Cys-Glu-His-D-2-Nal-Arg-2-Nal-Ala-Cys)-(Pro)₂-Lys-Asp-β-Ala-
Gly-(Arg)2-Lys-(Arg)₂-Gln-(Arg)₃-NH₂;
(SEQ ID NO: 265)
Ac-c(Cys-Glu-His-D-2-Nal-Arg-2-Nal-Ala-Cys)-(Pro)₂-Lys-Asp-β-Ala-
Gly-Arg-Lys-(Arg)₃-Gln-(Arg)₃-NH₂;
(SEQ ID NO: 266)
Ac-c(Cys-Glu-His-D-2-Nal-Arg-1-Nal-Ala-Cys)-(Pro)₂-Lys-Asp-β-Ala-
Tyr-Gly-(Arg)₂-Lys-(Arg)₂-Gln-(Arg)₃-NH₂;
(SEQ ID NO: 267)
Ac-c(Cys-Glu-His-D-2-Nal-Arg-1-Nal-Ala-Cys)-(Pro)₂-Lys-Asp-β-Ala-
Tyr-Gly-Arg-Lys-(Arg)₃-Gln-(Arg)₃-NH₂;
(SEQ ID NO: 268)
Ac-c(Cys-Glu-His-D-2-Nal-Arg-1-Nal-Ala-Cys)-(Pro)₂-Lys-Asp-β-Ala-
Gly-(Arg)₂-Lys-(Arg)₂-Gln-(Arg)₃-NH₂;
(SEQ ID NO: 269)
Ac-c(Cys-Glu-His-D-2-Nal-Arg-1-Nal-Ala-Cys)-(Pro)₂-Lys-Asp-β-Ala-
Gly-Arg-Lys-(Arg)₃-Gln-(Arg)₃-NH₂;
(SEQ ID NO: 270)
Ac-c(Cys-Glu-His-D-2-Nal-Arg-2-Nal-Ala-Cys)-(Pro)₂-Lys-Asp-β-Ala-
(Arg)₂-Lys-(Arg)₂-Gln-(Arg)₃-NH₂;
(SEQ ID NO: 271)
Ac-c(Cys-Glu-His-D-2-Nal-Arg-2-Nal-Ala-Cys)-(Pro)₂-Lys-Asp-β-Ala-
Arg-Lys-(Arg)₃-Gln-(Arg)₃-NH₂;
(SEQ ID NO: 272)
Ac-c(Cys-Glu-His-D-2-Nal-Arg-2-Nal-Ala-Cys)-(Pro)₂-Lys-Asp-β-Ala-
Tyr-Gly-Arg-Lys-(Arg)₃-Gln-(Arg)₃-NH₂;
(SEQ ID NO: 273)
Ac-c(Cys-Glu-His-D-2-Nal-Arg-Bal-Ala-Cys)-(Pro)₂-Lys-Asp-β-Ala-
(Arg)₂-Lys-(Arg)₂-Gln-(Arg)₃-NH₂;
(SEQ ID NO: 274)
Ac-c(Cys-Glu-His-D-2-Nal-Arg-Bal-Ala-Cys)-(Pro)₂-Lys-Asp-β-Ala-
Arg-Lys-(Arg)₃-Gln-(Arg)₃-NH₂;
(SEQ ID NO: 275)
Ac-c(Cys-Glu-His-D-2-Nal-Arg-Bal-Ala-Cys)-(Pro)₂-Lys-Asp-β-Ala-
Tyr-Gly-(Arg)₂-Lys-(Arg)₂-Gln-(Arg)₃-NH₂;
(SEQ ID NO: 276)
Ac-c(Cys-Glu-His-D-2-Nal-Arg-Bal-Ala-Cys)-(Pro)₂-Lys-Asp-β-Ala-
Tyr-Gly-Arg-Lys-(Arg)₃-Gln-(Arg)₃-NH₂;
(SEQ ID NO: 277)
Ac-c(Cys-Glu-His-D-2-Nal-Arg-Bal-Ala-Cys)-(Pro)₂-Lys-Asp-β-Ala-
Gly-(Arg)₂-Lys-(Arg)₂-Gln-(Arg)₃-NH₂;
(SEQ ID NO: 278)
Ac-c(Cys-Glu-His-D-2-Nal-Arg-Bal-Ala-Cys)-(Pro)₂-Lys-Asp-β-Ala-
Gly-Arg-Lys-(Arg)₃-Gln-(Arg)₃-NH₂;
(SEQ ID NO: 279)
Ac-c(Cys-Glu-His-D-2-Nal-Arg-Trp-Ala-Cys)-(Pro)₂-Lys-Asp-β-Ala-
(Arg)₅-Gln-(Arg)₃-NH₂;
(SEQ ID NO: 280)
Ac-c(Cys-Glu-His-D-2-Nal-Arg-Trp-Ala-Cys)-(Pro)₂-Arg-Asp-β-Ala-
(Arg)₅-Gln-(Arg)₃-NH₂;
(SEQ ID NO: 281)
Ac-c(Cys-Glu-His-D-2-Nal-Arg-Trp-Ala-Cys)-(Pro)₂-Lys-Asp-β-Ala-
Tyr-Gly-(Arg)₅-Gln-(Arg)₃-NH₂;
(SEQ ID NO: 282)
Ac-c(Cys-Glu-His-D-2-Nal-Arg-Trp-Ala-Cys)-(Pro)₂-Arg-Asp-β-Ala-
Tyr-Gly-(Arg)₅-Gln-(Arg)₃-NH₂;
(SEQ ID NO: 283)
Ac-c(Cys-Glu-His-D-2-Nal-Arg-Trp-Ala-Cys)-(Pro)₂-Lys-Asp-β-Ala-
(Arg)₅-Gln-(Arg)₄-NH₂;
(SEQ ID NO: 284)
Ac-c(Cys-Glu-His-D-2-Nal-Arg-Trp-Ala-Cys)-(Pro)₂-Arg-Asp-β-Ala-
(Arg)₅-Gln-(Arg)₄-NH₂;
(SEQ ID NO: 285)
Ac-c(Cys-Glu-His-D-2-Nal-Arg-Trp-Ala-Cys)-(Pro)₂-Lys-Asp-β-Ala-
Tyr-Gly-(Arg)₅-Gln-(Arg)₄-NH₂;
(SEQ ID NO: 286)
Ac-c(Cys-Glu-His-D-2-Nal-Arg-Trp-Ala-Cys)-(Pro)₂-Arg-Asp-β-Ala-
Tyr-Gly-(Arg)₅-Gln-(Arg)₄-NH₂;
(SEQ ID NO: 287)
Ac-c(Cys-Glu-His-D-2-Nal-Arg-1-Nal-Ala-Cys)-(Pro)₂-Lys-Asp-β-Ala-
(Arg)₅-Gln-(Arg)₄-NH₂;
(SEQ ID NO: 288)
Ac-c(Cys-Glu-His-D-2-Nal-Arg-1-Nal-Ala-Cys)-(Pro)₂-Arg-Asp-β-Ala-
(Arg)₅-Gln-(Arg)₄-NH₂;
(SEQ ID NO: 289)
Ac-c(Cys-Glu-His-D-2-Nal-Arg-1-Nal-Ala-Cys)-(Pro)₂-Arg-Asp-β-Ala-
(Arg)₆-Gln-(Arg)₃-NH₂;
(SEQ ID NO: 290)
Ac-c(Cys-Glu-His-D-2-Nal-Arg-1-Nal-Ala-Cys)-(Pro)₂-Lys-Asp-β-Ala-
Tyr-Gly-(Arg)₅-Gln-(Arg)₃-NH₂;
(SEQ ID NO: 291)
Ac-c(Cys-Glu-His-D-2-Nal-Arg-1-Nal-Ala-Cys)-(Pro)₂-Arg-Asp-β-Ala-
Tyr-Gly-(Arg)₅-Gln-(Arg)₃-NH₂;
(SEQ ID NO: 292)
Ac-c(Cys-Glu-His-D-2-Nal-Arg-1-Nal-Ala-Cys)-(Pro)₂-Lys-Asp-β-Ala-
Tyr-Gly-(Arg)₅-Gln-(Arg)₄-NH₂;
(SEQ ID NO: 293)
Ac-c(Cys-Glu-His-D-2-Nal-Arg-1-Nal-Ala-Cys)-(Pro)₂-Arg-Asp-β-Ala-
Tyr-Gly-(Arg)₅-Gln-(Arg)₄-NH₂;
(SEQ ID NO: 294)
Ac-c(Cys-Glu-His-D-2-Nal-Arg-1-Nal-Ala-Cys)-(Pro)₂-Lys-Asp-β-Ala-
Tyr-Gly-(Arg)₆-Gln-(Arg)₃-NH₂;
(SEQ ID NO: 295)
Ac-c(Cys-Glu-His-D-2-Nal-Arg-1-Nal-Ala-Cys)-(Pro)₂-Arg-Asp-β-Ala-
Tyr-Gly-(Arg)₆-Gln-(Arg)₃-NH₂;
(SEQ ID NO: 296)
Ac-c(Cys-Glu-His-D-2-Nal-Arg-2-Nal-Ala-Cys)-(Pro)₂-Arg-Asp-β-Ala-
(Arg)₆-Gln-(Arg)₃-NH₂;
(SEQ ID NO: 297)
Ac-c(Cys-Glu-His-D-2-Nal-Arg-2-Nal-Ala-Cys)-(Pro)₂-Lys-Asp-β-Ala-
(Arg)₅-Gln-(Arg)₄-NH₂;
(SEQ ID NO: 298)
Ac-c(Cys-Glu-His-D-2-Nal-Arg-2-Nal-Ala-Cys)-(Pro)₂-Arg-Asp-β-Ala-
(Arg)₅-Gln-(Arg)₄-NH₂;
(SEQ ID NO: 299)
Ac-c(Cys-Glu-His-D-2-Nal-Arg-2-Nal-Ala-Cys)-(Pro)₂-Lys-Asp-β-Ala-
Tyr-Gly-(Arg)₅-Gln-(Arg)₃-NH₂;
(SEQ ID NO: 300)
Ac-c(Cys-Glu-His-D-2-Nal-Arg-2-Nal-Ala-Cys)-(Pro)₂-Arg-Asp-β-Ala-
Tyr-Gly-(Arg)₅-Gln-(Arg)₃-NH₂;
(SEQ ID NO: 301)
Ac-c(Cys-Glu-His-D-2-Nal-Arg-2-Nal-Ala-Cys)-(Pro)₂-Lys-Asp-β-Ala-
Tyr-Gly-(Arg)₆-Gln-(Arg)₃-NH₂;
(SEQ ID NO: 302)
Ac-c(Cys-Glu-His-D-2-Nal-Arg-2-Nal-Ala-Cys)-(Pro)₂-Arg-Asp-β-Ala-
Tyr-Gly-(Arg)₆-Gln-(Arg)₃-NH₂;
(SEQ ID NO: 303)
Ac-c(Cys-Glu-His-D-2-Nal-Arg-2-Nal-Ala-Cys)-(Pro)₂-Lys-Asp-β-Ala-
Tyr-Gly-(Arg)₅-Gln-(Arg)₄-NH₂;
(SEQ ID NO: 304)
Ac-c(Cys-Glu-His-D-2-Nal-Arg-2-Nal-Ala-Cys)-(Pro)₂-Arg-Asp-β-Ala-
Tyr-Gly-(Arg)₅-Gln-(Arg)₄-NH₂;
(SEQ ID NO: 305)
Ac-c(Cys-Glu-His-D-2-Nal-Arg-Bal-Ala-Cys)-(Pro)₂-Lys-Asp-β-Ala-
(Arg)₅-Gln-(Arg)₄-NH₂;
(SEQ ID NO: 306)
Ac-c(Cys-Glu-His-D-2-Nal-Arg-Bal-Ala-Cys)-(Pro)₂-Arg-Asp-β-Ala-
(Arg)₅-Gln-(Arg)₄-NH₂;
(SEQ ID NO: 307)
Ac-c(Cys-Glu-His-D-2-Nal-Arg-Bal-Ala-Cys)-(Pro)₂-Arg-Asp-β-Ala-
Tyr-Gly-(Arg)₅-Gln-(Arg)₃-NH₂;
(SEQ ID NO: 308)
Ac-c(Cys-Glu-His-D-2-Nal-Arg-Bal-Ala-Cys)-(Pro)₂-Lys-Asp-β-Ala-
Tyr-Gly-(Arg)₅-Gln-(Arg)₄-NH₂;
(SEQ ID NO: 309)
Ac-c(Cys-Glu-His-D-2-Nal-Arg-Bal-Ala-Cys)-(Pro)₂-Arg-Asp-β-Ala-
Tyr-Gly-(Arg)₅-Gln-(Arg)₄-NH₂;
(SEQ ID NO: 310)
Ac-c(Cys-Glu-His-D-2-Nal-Arg-Bal-Ala-Cys)-(Pro)₂-Lys-Asp-β-Ala-
Tyr-Gly-(Arg)₆-Gln-(Arg)₃-NH₂;
(SEQ ID NO: 311)
Ac-c(Cys-Glu-His-D-2-Nal-Arg-Bal-Ala-Cys)-(Pro)₂-Arg-Asp-β-Ala-
Tyr-Gly-(Arg)₆-Gln-(Arg)₃-NH₂;
(SEQ ID NO: 312)
Ac-Nle-c(Cys-D-Ala-His-D-Phe-Arg-Trp-Cys)-(Doc)₂-Tyr-Gly-Arg-
(Lys)₂-(Arg)₂-Gln-(Arg)₃-NH₂;
(SEQ ID NO: 313)
Ac-Nle-c(Cys-D-Ala-His-D-Phe-Arg-Trp-Cys)-β-Ala-Tyr-Gly-Arg-
(Lys)₂-Arg-Gln-(Arg)₄-NH₂;
(SEQ ID NO: 314)
Ac-Nle-c(Cys-D-Ala-His-D-Phe-Arg-Trp-Cys)-Doc-Tyr-Gly-Arg-(Lys)₂-
(Arg)₂-Gln-(Arg)₃-NH₂;
(SEQ ID NO: 315)
Ac-Nle-c(Cys-D-Ala-His-D-Phe-Arg-Trp-Cys)-β-Ala-(Arg)₅-Gln-(Arg)₃-
NH₂;
(SEQ ID NO: 316)
Ac-Nle-c(Cys-D-Ala-His-D-Phe-Arg-Trp-Cys)-β-Ala-Gly-(Arg)₅-Gln-
(Arg)₃-NH₂;
(SEQ ID NO: 317)
Ac-Nle-c(Cys-D-Ala-His-D-Phe-Arg-Trp-Cys)-β-Ala-Tyr-Gly-(Arg)₅-
Gln-(Arg)₃-NH₂;
(SEQ ID NO: 318)
Ac-Nle-c(Cys-D-Ala-His-D-Phe-Arg-Trp-Cys)-β-Ala-Gly-(Arg)₅-Gln-
(Arg)₄-NH₂;
(SEQ ID NO: 319)
Ac-Nle-c(Cys-D-Ala-His-D-Phe-Arg-Trp-Cys)-β-Ala-Tyr-Gly-(Arg)₂-
Lys-(Arg)₂-Gln-(Arg)₃-NH₂;
(SEQ ID NO: 320)
Ac-Nle-c(Cys-D-Ala-His-D-Phe-Arg-Trp-Cys)-β-Ala-Tyr-Gly-Arg-Lys-
(Arg)₃-Gln-(Arg)₃-NH₂;
(SEQ ID NO: 321)
Ac-Nle-c(Cys-D-Ala-His-D-Phe-Arg-Trp-Cys)-β-Ala-Gly-(Arg)₂-Lys-
(Arg)₂-Gln-(Arg)₃-NH₂;
(SEQ ID NO: 322)
Ac-Nle-c(Cys-D-Ala-His-D-Phe-Arg-Trp-Cys)-β-Ala-Gly-Arg-Lys-
(Arg)₃-Gln-(Arg)₃-NH₂;
(SEQ ID NO: 323)
Ac-Nle-c(Cys-D-Ala-His-D-Phe-Arg-Trp-Cys)-β-Ala-(Arg)₂-Lys-(Arg)₂-
Gln-(Arg)₃-NH₂;
(SEQ ID NO: 324)
Ac-Nle-c(Cys-D-Ala-His-D-Phe-Arg-Trp-Cys)-β-Ala-Arg-Lys-(Arg)₃-
Gln-(Arg)₃-NH₂;
(SEQ ID NO: 325)
Ac-Nle-c(Cys-D-Ala-His-D-Phe-Arg-Trp-Cys)-(β-Ala)₂-(Arg)₅-Gln-
(Arg)₃-NH₂;
(SEQ ID NO: 326)
Ac-Nle-c(Cys-D-Ala-His-D-Phe-Arg-Trp-Cys)-(β-Ala)₂-Gly-(Arg)₅-
Gln-(Arg)₃-NH₂;
(SEQ ID NO: 327)
Ac-Nle-c(Cys-D-Ala-His-D-Phe-Arg-Trp-Cys)-(β-Ala)₂-Tyr-Gly-(Arg)₅-
Gln-(Arg)₃-NH₂;
(SEQ ID NO: 328)
Ac-Nle-c(Cys-D-Ala-His-D-Phe-Arg-Trp-Cys)-Doc-(Arg)₅-Gln-(Arg)₃-
NH₂;
(SEQ ID NO: 329)
Ac-Nle-c(Cys-D-Ala-His-D-Phe-Arg-Trp-Cys)-Doc-Gly-(Arg)₅-Gln-
(Arg)₃-NH₂;
(SEQ ID NO: 330)
Ac-Nle-c(Cys-D-Ala-His-D-Phe-Arg-Trp-Cys)-Doc-Tyr-Gly-(Arg)₅-
Gln-(Arg)₃-NH₂;
(SEQ ID NO: 331)
Ac-Nle-c(Cys-D-Ala-His-D-Phe-Arg-Trp-Cys)-(Doc)₂-(Arg)₅-Gln-
(Arg)₃-NH₂;
(SEQ ID NO: 332)
Ac-Nle-c(Cys-D-Ala-His-D-Phe-Arg-Trp-Cys)-(Doc)₂-Gly-(Arg)₅-Gln-
(Arg)₃-NH₂;
(SEQ ID NO: 333)
Ac-Nle-c(Cys-D-Ala-His-D-Phe-Arg-Trp-Cys)-(Doc)₂-Tyr-Gly-(Arg)₅-
Gln-(Arg)₃-NH₂;
(SEQ ID NO: 334)
Ac-Nle-c(Cys-D-Ala-His-D-Phe-Arg-Trp-Cys)-β-Ala-(Arg)5-Gln-(Arg)₄-
NH₂;
(SEQ ID NO: 335)
Ac-Nle-c(Cys-D-Ala-His-D-Phe-Arg-Trp-Cys)-β-Ala-Tyr-Gly-(Arg)₅-
Gln-(Arg)₄-NH₂;
(SEQ ID NO: 336)
Ac-Nle-c(Cys-D-Ala-His-D-Phe-Arg-Trp-Cys)-(β-Ala)₂-(Arg)₅-Gln-
(Arg)₄-NH₂;
(SEQ ID NO: 337)
Ac-Nle-c(Cys-D-Ala-His-D-Phe-Arg-Trp-Cys)-(β-Ala)₂-Gly-(Arg)₅-Gln-
(Arg)₄-NH₂;
(SEQ ID NO: 338)
Ac-Nle-c(Cys-D-Ala-His-D-Phe-Arg-Trp-Cys)-(β-Ala)₂-Tyr-Gly-(Arg)₅-
Gln-(Arg)₄-NH₂;
(SEQ ID NO: 339)
Ac-Nle-c(Cys-D-Ala-His-D-Phe-Arg-Trp-Cys)-Doc-(Arg)₅-Gln-(Arg)₄-
NH₂;
(SEQ ID NO: 340)
Ac-Nle-c(Cys-D-Ala-His-D-Phe-Arg-Trp-Cys)-Doc-Gly-(Arg)₅-Gln-
(Arg)₄-NH₂;
(SEQ ID NO: 341)
Ac-Nle-c(Cys-D-Ala-His-D-Phe-Arg-Trp-Cys)-Doc-Tyr-Gly-(Arg)₅-Gln-
(Arg)₄-NH₂;
(SEQ ID NO: 342)
Ac-Nle-c(Cys-D-Ala-His-D-Phe-Arg-Trp-Cys)-(Doc)₂-(Arg)₅-Gln-
(Arg)₄-NH₂;
(SEQ ID NO: 343)
Ac-Nle-c(Cys-D-Ala-His-D-Phe-Arg-Trp-Cys)-(Doc)₂-Gly-(Arg)₅-Gln-
(Arg)₄-NH₂;
(SEQ ID NO: 344)
Ac-Nle-c(Cys-D-Ala-His-D-Phe-Arg-Trp-Cys)-(Doc)₂-Tyr-Gly-(Arg)₅-
Gln-(Arg)₄-NH₂;
(SEQ ID NO: 345)
Ac-Nle-c(Cys-His-D-Phe-Arg-Trp-Gaba-Cys)-β-Ala-Tyr-Gly-(Arg)₅-
Gln-(Arg)₃-NH₂;
(SEQ ID NO: 346)
Ac-Nle-c(Cys-His-D-Phe-Arg-Trp-Gaba-Cys)-β-Ala-(Arg)₅-Gln-(Arg)₃-
NH₂;
(SEQ ID NO: 347)
Ac-Nle-c(Asp-His-D-Phe-Arg-Trp-Ala-Lys)-β-Ala-Tyr-Gly-(Arg)₅-Gln-
(Arg)₃-NH₂;
(SEQ ID NO: 348)
Ac-Nle-c(Asp-His-D-Phe-Arg-Trp-Ala-Lys)-β-Ala-(Arg)₅-Gln-(Arg)₃-
NH₂;
(SEQ ID NO: 349)
Ac-Nle-c(Asp-His-D-Phe-Arg-Trp-Lys)-β-Ala-Tyr-Gly-(Arg)₅-Gln-
(Arg)₃-NH₂;
(SEQ ID NO: 350)
Ac-Nle-c(Asp-His-D-Phe-Arg-Trp-Lys)-β-Ala-Gly-(Arg)₅-Gln-(Arg)₃-
NH₂;
(SEQ ID NO: 351)
Ac-Nle-c(Asp-His-D-Phe-Arg-Trp-Lys)-β-Ala-(Arg)₅-Gln-(Arg)₃-NH₂;
(SEQ ID NO: 352)
Ac-Nle-c(Asp-His-D-Phe-Arg-Trp-Lys)-(β-Ala)₂-Tyr-Gly-(Arg)₅-Gln-
(Arg)₃-NH₂;
(SEQ ID NO: 353)
Ac-Nle-c(Asp-His-D-Phe-Arg-Trp-Lys)-(β-Ala)₂-Gly-(Arg)₅-Gln-(Arg)₃-
NH₂;
(SEQ ID NO: 354)
Ac-Nle-c(Asp-His-D-Phe-Arg-Trp-Lys)-(β-Ala)₂-(Arg)₅-Gln-(Arg)₃-
NH₂;
(SEQ ID NO: 355)
Ac-Nle-c(Asp-His-D-Phe-Arg-Trp-Lys)-Doc-Tyr-Gly-(Arg)₅-Gln-(Arg)₃-
NH₂;
(SEQ ID NO: 356)
Ac-Nle-c(Asp-His-D-Phe-Arg-Trp-Lys)-Doc-Gly-(Arg)₅-Gln-(Arg)₃-
NH₂;
(SEQ ID NO: 357)
Ac-Nle-c(Asp-His-D-Phe-Arg-Trp-Lys)-Doc-(Arg)₅-Gln-(Arg)₃-NH₂;
(SEQ ID NO: 358)
Ac-Nle-c(Asp-His-D-Phe-Arg-Trp-Lys)-(Doc)₂-Tyr-Gly-(Arg)₅-Gln-
(Arg)₃-NH₂;
(SEQ ID NO: 359)
Ac-Nle-c(Asp-His-D-Phe-Arg-Trp-Lys)-(Doc)₂-Gly-(Arg)₅-Gln-(Arg)₃-
NH₂;
(SEQ ID NO: 360)
Ac-Nle-c(Asp-His-D-Phe-Arg-Trp-Lys)-(Doc)₂-(Arg)₅-Gln-(Arg)₃-
NH₂;
(SEQ ID NO: 361)
Ac-Nle-c(Asp-His-D-Phe-Arg-Trp-Lys)-β-Ala-Tyr-Gly-(Arg)₅-Gln-
(Arg)₄-NH₂;
(SEQ ID NO: 362)
Ac-Nle-c(Asp-His-D-Phe-Arg-Trp-Lys)-β-Ala-Gly-(Arg)₅-Gln-(Arg)₄-
NH₂;
(SEQ ID NO: 363)
Ac-Nle-c(Asp-His-D-Phe-Arg-Trp-Lys)-β-Ala-(Arg)₅-Gln-(Arg)₄-NH₂;
(SEQ ID NO: 364)
Ac-Nle-c(Asp-His-D-Phe-Arg-Trp-Lys)-(β-Ala)₂-Tyr-Gly-(Arg)₅-Gln-
(Arg)₄-NH₂;
(SEQ ID NO: 365)
Ac-Nle-c(Asp-His-D-Phe-Arg-Trp-Lys)-(β-Ala)₂-Gly-(Arg)₅-Gln-
(Arg)₄-NH₂;
(SEQ ID NO: 366)
Ac-Nle-c(Asp-His-D-Phe-Arg-Trp-Lys)-(β-Ala)₂-(Arg)₅-Gln-(Arg)₄-
NH₂;
(SEQ ID NO: 367)
Ac-Nle-c(Asp-His-D-Phe-Arg-Trp-Lys)-Doc-Tyr-Gly-(Arg)₅-Gln-(Arg)₄-
NH₂;
(SEQ ID NO: 368)
Ac-Nle-c(Asp-His-D-Phe-Arg-Trp-Lys)-Doc-Gly-(Arg)₅-Gln-(Arg)₄-
NH₂;
(SEQ ID NO: 369)
Ac-Nle-c(Asp-His-D-Phe-Arg-Trp-Lys)-Doc-(Arg)₅-Gln-(Arg)₄-NH₂;
(SEQ ID NO: 370)
Ac-Nle-c(Asp-His-D-Phe-Arg-Trp-Lys)-(Doc)₂-Tyr-Gly-(Arg)₅-Gln-
(Arg)₄-NH₂;
(SEQ ID NO: 371)
Ac-Nle-c(Asp-His-D-Phe-Arg-Trp-Lys)-(Doc)₂-Gly-(Arg)₅-Gln-(Arg)₄-
NH₂;
(SEQ ID NO: 372)
Ac-Nle-c(Asp-His-D-Phe-Arg-Trp-Lys)-(Doc)₂-(Arg)₅-Gln-(Arg)₄-
NH₂;
(SEQ ID NO: 373)
Ac-Nle-c(Asp-His-D-Phe-Arg-Trp-β-Ala-Lys)-β-Ala-Tyr-Gly-(Arg)₅-
Gln-(Arg)₃-NH₂;
(SEQ ID NO: 374)
Ac-Nle-c(Asp-His-D-Phe-Arg-Trp-β-Ala-Lys)-β-Ala-(Arg)₅-Gln-(Arg)₃-
NH₂;
(SEQ ID NO: 375)
Ac-Nle-c(Cys-His-D-Phe-Arg-Trp-Ahx-Cys)-β-Ala-Tyr-Gly-(Arg)₅-
Gln-(Arg)₃-NH₂;
(SEQ ID NO: 376)
Ac-Nle-c(Cys-His-D-Phe-Arg-Trp-Ahx-Cys)-β-Ala-(Arg)₅-Gln-(Arg)₃-
NH₂;
(SEQ ID NO: 377)
D-Phe-c(Cys-His-D-Phe-Arg-Trp-β-Ala-D-Cys)-Thr-β-Ala-Tyr-Gly-
(Arg)₅-Gln-(Arg)₃-NH₂;
(SEQ ID NO: 378)
D-Phe-c(Cys-His-D-Phe-Arg-Trp-β-Ala-D-Cys)-Thr-β-Ala-(Arg)₅-Gln-
(Arg)₃-NH₂;
(SEQ ID NO: 379)
Ac-Nle-c(Cys-His-D-Phe-Arg-Trp-Apn-Cys)-β-Ala-Tyr-Gly-(Arg)₅-Gln-
(Arg)₃-NH₂;
(SEQ ID NO: 380)
Ac-Nle-c(Cys-His-D-Phe-Arg-Trp-Apn-Cys)-β-Ala-(Arg)₅-Gln-(Arg)₃-
NH₂;
(SEQ ID NO: 381)
Ac-Cha-c(Asp-His-D-Phe-Arg-Trp-Gaba-Lys)-β-Ala-Tyr-Gly-(Arg)₅-
Gln-(Arg)₃-NH₂;
(SEQ ID NO: 382)
Ac-Cha-c(Asp-His-D-Phe-Arg-Trp-Gaba-Lys)-β-Ala-(Arg)₅-Gln-(Arg)₃-
NH₂;
(SEQ ID NO: 383)
Ac-Nle-c(Asp-His-D-Phe-Arg-Trp-Gaba-Lys)-β-Ala-Tyr-Gly-(Arg)₅-
Gln-(Arg)₃-NH₂;
(SEQ ID NO: 384)
Ac-Nle-c(Asp-His-D-Phe-Arg-Trp-Gaba-Lys)-β-Ala-(Arg)₅-Gln-(Arg)₃-
NH₂;
(SEQ ID NO: 385)
Ac-Chg-c(Asp-His-D-Phe-Arg-Trp-Gaba-Lys)-β-Ala-Tyr-Gly-(Arg)₅-
Gln-(Arg)₃-NH₂;
(SEQ ID NO: 386)
Ac-Chg-c(Asp-His-D-Phe-Arg-Trp-Gaba-Lys)-β-Ala-(Arg)₅-Gln-(Arg)₃-
NH₂;
(SEQ ID NO: 387)
Ac-hCha-c(Asp-His-D-Phe-Arg-Trp-Gaba-Lys)-β-Ala-Tyr-Gly-(Arg)₅-
Gln-(Arg)₃-NH₂;
(SEQ ID NO: 388)
Ac-hCha-c(Asp-His-D-Phe-Arg-Trp-Gaba-Lys)-β-Ala-(Arg)₅-Gln-
(Arg)₃-NH₂;
(SEQ ID NO: 389)
Ac-hCha-c(Asp-His-D-Phe-Arg-Trp-Gaba-Lys)-(β-Ala)₂-Tyr-Gly-(Arg)₅-
Gln-(Arg)₃-NH₂;
(SEQ ID NO: 390)
Ac-hCha-c(Asp-His-D-Phe-Arg-Trp-Gaba-Lys)-(β-Ala)₂-(Arg)₅-Gln-
(Arg)₃-NH₂;
(SEQ ID NO: 391)
Ac-hCha-c(Asp-His-D-Phe-Arg-Trp-Gaba-Lys)-Doc-Tyr-Gly-(Arg)₅-
Gln-(Arg)₃-NH₂;
(SEQ ID NO: 392)
Ac-hCha-c(Asp-His-D-Phe-Arg-Trp-Gaba-Lys)-Doc-(Arg)₅-Gln-(Arg)₃-
NH₂;
(SEQ ID NO: 393)
Ac-hCha-c(Asp-His-D-Phe-Arg-Trp-Gaba-Lys)-(Doc)₂-Tyr-Gly-(Arg)₅-
Gln-(Arg)₃-NH₂;
(SEQ ID NO: 394)
Ac-hCha-c(Asp-His-D-Phe-Arg-Trp-Gaba-Lys)-(Doc)₂-(Arg)₅-Gln-
(Arg)₃-NH₂;
(SEQ ID NO: 395)
Ac-hCha-c(Asp-His-D-Phe-Arg-Trp-Gaba-Lys)-β-Ala-Tyr-Gly-(Arg)₅-
Gln-(Arg)₄-NH₂;
(SEQ ID NO: 396)
Ac-hCha-c(Asp-His-D-Phe-Arg-Trp-Gaba-Lys)-β-Ala-(Arg)₅-Gln-
(Arg)₄-NH₂;
(SEQ ID NO: 397)
Ac-hCha-c(Asp-His-D-Phe-Arg-Trp-Gaba-Lys)-(β-Ala)₂-Tyr-Gly-(Arg)₅-
Gln-(Arg)₄-NH₂;
(SEQ ID NO: 398)
Ac-hCha-c(Asp-His-D-Phe-Arg-Trp-Gaba-Lys)-(β-Ala)₂-(Arg)₅-Gln-
(Arg)₄-NH₂;
(SEQ ID NO: 399)
Ac-hCha-c(Asp-His-D-Phe-Arg-Trp-Gaba-Lys)-Doc-Tyr-Gly-(Arg)₅-
Gln-(Arg)₄-NH₂;
(SEQ ID NO: 400)
Ac-hCha-c(Asp-His-D-Phe-Arg-Trp-Gaba-Lys)-Doc-(Arg)₅-Gln-(Arg)₄-
NH₂;
(SEQ ID NO: 401)
Ac-hCha-c(Asp-His-D-Phe-Arg-Trp-Gaba-Lys)-(Doc)₂-Tyr-Gly-(Arg)₅-
Gln-(Arg)₄-NH₂;
(SEQ ID NO: 402)
Ac-hCha-c(Asp-His-D-Phe-Arg-Trp-Gaba-Lys)-(Doc)₂-(Arg)₅-Gln-
(Arg)₄-NH₂;
(SEQ ID NO: 403)
Ac-D-Chg-c(Asp-His-D-Phe-Arg-Trp-Gaba-Lys)-β-Ala-Tyr-Gly-(Arg)₅-
Gln-(Arg)₃-NH₂;
(SEQ ID NO: 404)
Ac-D-Chg-c(Asp-His-D-Phe-Arg-Trp-Gaba-Lys)-β-Ala-(Arg)₅-Gln-
(Arg)₃-NH₂;
(SEQ ID NO: 405)
Ac-hPhe-c(Asp-His-D-Phe-Arg-Trp-Gaba-Lys)-β-Ala-Tyr-Gly-(Arg)₅-
Gln-(Arg)₃-NH₂;
(SEQ ID NO: 406)
Ac-hPhe-c(Asp-His-D-Phe-Arg-Trp-Gaba-Lys)-β-Ala-(Arg)₅-Gln-(Arg)₃-
NH₂;
(SEQ ID NO: 407)
Ac-Nle-c(Cys-His-D-Phe-Arg-D-Trp-Apn-Cys)-β-Ala-Tyr-Gly-(Arg)₅-
Gln-(Arg)₃-NH₂;
(SEQ ID NO: 408)
Ac-Nle-c(Cys-His-D-Phe-Arg-D-Trp-Apn-Cys)-β-Ala-(Arg)₅-Gln-
(Arg)₃-NH₂;
(SEQ ID NO: 409)
Ac-Nle-c(Cys-His-D-Phe-Arg-D-Trp-Ahx-Cys)-β-Ala-Tyr-Gly-(Arg)₅-
Gln-(Arg)₃-NH₂;
(SEQ ID NO: 410)
Ac-Nle-c(Cys-His-D-Phe-Arg-D-Trp-Ahx-Cys)-β-Ala-(Arg)₅-Gln-
(Arg)₃-NH₂;
(SEQ ID NO: 411)
Ac-Nle-c(Cys-His-D-Phe-Arg-D-Trp-β-Ala-Cys)-β-Ala-Tyr-Gly-(Arg)₅-
Gln-(Arg)₃-NH₂;
(SEQ ID NO: 412)
Ac-Nle-c(Cys-His-D-Phe-Arg-D-Trp-β-Ala-Cys)-β-Ala-(Arg)₅-Gln-
(Arg)₃-NH₂;
(SEQ ID NO: 413)
Ac-Nle-c(Cys-D-Ala-His-D-Phe-Arg-Trp-Pen)-β-Ala-Tyr-Gly-(Arg)₅-
Gln-(Arg)₃-NH₂;
(SEQ ID NO: 414)
Ac-Nle-c(Cys-D-Ala-His-D-Phe-Arg-Trp-Pen)-β-Ala-Gly-(Arg)₅-Gln-
(Arg)₃-NH₂;
(SEQ ID NO: 415)
Ac-Nle-c(Cys-D-Ala-His-D-Phe-Arg-Trp-Pen)-β-Ala-(Arg)₅-Gln-(Arg)₃-
NH₂;
(SEQ ID NO: 416)
Ac-Nle-c(Cys-D-Ala-His-D-Phe-Arg-Trp-Pen)-(β-Ala)₂-Tyr-Gly-(Arg)₅-
Gln-(Arg)₃-NH₂;
(SEQ ID NO: 417)
Ac-Nle-c(Cys-D-Ala-His-D-Phe-Arg-Trp-Pen)-(β-Ala)₂-Gly-(Arg)₅-
Gln-(Arg)₃-NH₂;
(SEQ ID NO: 418)
Ac-Nle-c(Cys-D-Ala-His-D-Phe-Arg-Trp-Pen)-(β-Ala)₂-(Arg)₅-Gln-
(Arg)₃-NH₂;
(SEQ ID NO: 419)
Ac-Nle-c(Cys-D-Ala-His-D-Phe-Arg-Trp-Pen)-Doc-Tyr-Gly-(Arg)₅-
Gln-(Arg)₃-NH₂;
(SEQ ID NO: 420)
Ac-Nle-c(Cys-D-Ala-His-D-Phe-Arg-Trp-Pen)-Doc-Gly-(Arg)₅-Gln-
(Arg)₃-NH₂;
(SEQ ID NO: 421)
Ac-Nle-c(Cys-D-Ala-His-D-Phe-Arg-Trp-Pen)-Doc-(Arg)₅-Gln-(Arg)₃-
NH₂;
(SEQ ID NO: 422)
Ac-Nle-c(Cys-D-Ala-His-D-Phe-Arg-Trp-Pen)-(Doc)₂-Tyr-Gly-(Arg)₅-
Gln-(Arg)₃-NH₂;
(SEQ ID NO: 423)
Ac-Nle-c(Cys-D-Ala-His-D-Phe-Arg-Trp-Pen)-(Doc)₂-Gly-(Arg)₅-Gln-
(Arg)₃-NH₂;
(SEQ ID NO: 424)
Ac-Nle-c(Cys-D-Ala-His-D-Phe-Arg-Trp-Pen)-(Doc)₂-(Arg)₅-Gln-
(Arg)₃-NH₂;
(SEQ ID NO: 425)
D-Phe-c(Cys-His-D-(Et)Tyr-Arg-Trp-β-Ala-D-Cys)-β-Ala-Tyr-Gly-
(Arg)₅-Gln-(Arg)₃-NH₂;
(SEQ ID NO: 426)
D-Phe-c(Cys-His-D-(Et)Tyr-Arg-Trp-β-Ala-D-Cys)-β-Ala-(Arg)₅-Gln-
(Arg)₃-NH₂;
(SEQ ID NO: 427)
D-Phe-c(Cys-His-D-(Et)Tyr-Arg-Trp-β-Ala-D-Cys)-β-Ala-Gly-(Arg)₅-
Gln-(Arg)₃-NH₂;
(SEQ ID NO: 428)
D-Phe-c(Cys-His-D-(Et)Tyr-Arg-Trp-β-Ala-D-Cys)-β-Ala-(Arg)₅-Gln-
(Arg)₄-NH₂;
(SEQ ID NO: 429)
D-Phe-c(Cys-His-D-(Et)Tyr-Arg-Trp-β-Ala-D-Cys)-(β-Ala)₂-Tyr-Gly-
(Arg)₅-Gln-(Arg)₃-NH₂;
(SEQ ID NO: 430)
D-Phe-c(Cys-His-D-(Et)Tyr-Arg-Trp-β-Ala-D-Cys)-(β-Ala)₂-(Arg)₅-
Gln-(Arg)₃-NH₂;
(SEQ ID NO: 431)
D-Phe-c(Cys-His-D-(Et)Tyr-Arg-Trp-β-Ala-D-Cys)-(β-Ala)₂-Gly-(Arg)₅-
Gln-(Arg)₃-NH₂;
(SEQ ID NO: 432)
D-Phe-c(Cys-His-D-(Et)Tyr-Arg-Trp-β-Ala-D-Cys)-(β-Ala)₂-(Arg)₅-Gln-
(Arg)₄-NH₂;
(SEQ ID NO: 433)
D-Phe-c(Cys-His-D-(Et)Tyr-Arg-Trp-β-Ala-D-Cys)-Doc-Tyr-Gly-
(Arg)₅-Gln-(Arg)₃-NH₂;
(SEQ ID NO: 434)
D-Phe-c(Cys-His-D-(Et)Tyr-Arg-Trp-β-Ala-D-Cys)-Doc-(Arg)₅-Gln-
(Arg)₃-NH₂;
(SEQ ID NO: 435)
D-Phe-c(Cys-His-D-(Et)Tyr-Arg-Trp-β-Ala-D-Cys)-Doc-Gly-(Arg)₅-
Gln-(Arg)₃-NH₂;
(SEQ ID NO: 436)
D-Phe-c(Cys-His-D-(Et)Tyr-Arg-Trp-β-Ala-D-Cys)-Doc-(Arg)₅-Gln-
(Arg)₄-NH₂;
(SEQ ID NO: 437)
D-Phe-c(Cys-His-D-(Et)Tyr-Arg-Trp-β-Ala-D-Cys)-(Doc)₂-Tyr-Gly-
(Arg)₅-Gln-(Arg)₃-NH₂;
(SEQ ID NO: 438)
D-Phe-c(Cys-His-D-(Et)Tyr-Arg-Trp-β-Ala-D-Cys)-(Doc)₂-(Arg)₅-Gln-
(Arg)₃-NH₂;
(SEQ ID NO: 439)
D-Phe-c(Cys-His-D-(Et)Tyr-Arg-Trp-β-Ala-D-Cys)-(Doc)₂-Gly-(Arg)₅-
Gln-(Arg)₃-NH₂;
(SEQ ID NO: 440)
D-Phe-c(Cys-His-D-(Et)Tyr-Arg-Trp-β-Ala-D-Cys)-(Doc)₂-(Arg)₅-Gln-
(Arg)₄-NH₂;
(SEQ ID NO: 441)
D-Phe-c(Cys-His-D-(Et)Tyr-hArg-Trp-β-Ala-D-Cys)-Thr-β-Ala-Tyr-
Gly-(Arg)₅-Gln-(Arg)₃-NH₂;
(SEQ ID NO: 442)
D-Phe-c(Cys-His-D-(Et)Tyr-hArg-Trp-β-Ala-D-Cys)-Thr-β-Ala-(Arg)₅-
Gln-(Arg)₃-NH₂;
(SEQ ID NO: 443)
D-Phe-c(Cys-His-D-(Et)Tyr-hArg-Trp-β-Ala-D-Cys)-Thr-(β-Ala)₂-Tyr-
Gly-(Arg)₅-Gln-(Arg)₃-NH₂;
(SEQ ID NO: 444)
D-Phe-c(Cys-His-D-(Et)Tyr-hArg-Trp-β-Ala-D-Cys)-Thr-(β-Ala)₂-
(Arg)₅-Gln-(Arg)₃-NH₂;
(SEQ ID NO: 445)
D-Phe-c(Cys-His-D-(Et)Tyr-hArg-Trp-β-Ala-D-Cys)-Thr-Doc-Tyr-Gly-
(Arg)₅-Gln-(Arg)₃-NH₂;
(SEQ ID NO: 446)
D-Phe-c(Cys-His-D-(Et)Tyr-hArg-Trp-β-Ala-D-Cys)-Thr-Doc-(Arg)₅-
Gln-(Arg)₃-NH₂;
(SEQ ID NO: 447)
D-Phe-c(Cys-His-D-(Et)Tyr-hArg-Trp-β-Ala-D-Cys)-Thr-(Doc)₂-Tyr-
Gly-(Arg)₅-Gln-(Arg)₃-NH₂;
(SEQ ID NO: 448)
D-Phe-c(Cys-His-D-(Et)Tyr-hArg-Trp-β-Ala-D-Cys)-Thr-β-Ala-Tyr-
Gly-(Arg)₅-Gln-(Arg)₄-NH₂;
(SEQ ID NO: 449)
D-Phe-c(Cys-His-D-(Et)Tyr-hArg-Trp-β-Ala-D-Cys)-Thr-β-Ala-(Arg)₅-
Gln-(Arg)₄-NH₂;
(SEQ ID NO: 450)
D-Phe-c(Cys-His-D-(Et)Tyr-hArg-Trp-β-Ala-D-Cys)-Thr-(β-Ala)₂-Tyr-
Gly-(Arg)₅-Gln-(Arg)₄-NH₂;
(SEQ ID NO: 451)
D-Phe-c(Cys-His-D-(Et)Tyr-hArg-Trp-β-Ala-D-Cys)-Thr-(β-Ala)₂-
(Arg)₅-Gln-(Arg)₄-NH₂;
(SEQ ID NO: 452)
D-Phe-c(Cys-His-D-(Et)Tyr-hArg-Trp-β-Ala-D-Cys)-Thr-Doc-Tyr-Gly-
(Arg)₅-Gln-(Arg)₄-NH₂;
(SEQ ID NO: 453)
D-Phe-c(Cys-His-D-(Et)Tyr-hArg-Trp-β-Ala-D-Cys)-Thr-Doc-(Arg)₅-
Gln-(Arg)₄-NH₂;
(SEQ ID NO: 454)
D-Phe-c(Cys-His-D-(Et)Tyr-hArg-Trp-β-Ala-D-Cys)-Thr-(Doc)₂-Tyr-
Gly-(Arg)₅-Gln-(Arg)₄-NH₂;
(SEQ ID NO: 455)
D-Phe-c(Cys-His-D-(Et)Tyr-hArg-Trp-β-Ala-D-Cys)-Thr-(Doc)₂-(Arg)₅-
Gln-(Arg)₄-NH₂;
(SEQ ID NO: 456)
D-Phe-c(Cys-His-D-(Et)Tyr-hArg-Bip-β-Ala-D-Cys)-Thr-β-Ala-Tyr-
Gly-(Arg)₅-Gln-(Arg)₃-NH₂;
(SEQ ID NO: 457)
D-Phe-c(Cys-His-D-(Et)Tyr-hArg-Bip-β-Ala-D-Cys)-Thr-β-Ala-Tyr-
Gly-(Arg)₅-Gln-(Arg)₄-NH₂;
(SEQ ID NO: 458)
D-Phe-c(Cys-His-D-(Et)Tyr-hArg-Bip-β-Ala-D-Cys)-Thr-β-Ala-(Arg)₅-
Gln-(Arg)₃-NH₂;
(SEQ ID NO: 459)
D-Phe-c(Cys-His-D-(Et)Tyr-hArg-Bip-β-Ala-D-Cys)-Thr-(β-Ala)₂-Tyr-
Gly-(Arg)₅-Gln-(Arg)₃-NH₂;
(SEQ ID NO: 460)
D-Phe-c(Cys-His-D-(Et)Tyr-hArg-Bip-β-Ala-D-Cys)-Thr-(β-Ala)₂-
(Arg)₅-Gln-(Arg)₃-NH₂;
(SEQ ID NO: 461)
D-Phe-c(Cys-His-D-(Et)Tyr-hArg-Bip-β-Ala-D-Cys)-Thr-Doc-Tyr-Gly-
(Arg)₅-Gln-(Arg)₃-NH₂;
(SEQ ID NO: 462)
D-Phe-c(Cys-His-D-(Et)Tyr-hArg-Bip-β-Ala-D-Cys)-Thr-Doc-Tyr-Gly-
(Arg)₅-Gln-(Arg)₄-NH₂;
(SEQ ID NO: 463)
D-Phe-c(Cys-His-D-(Et)Tyr-hArg-Bip-β-Ala-D-Cys)-Thr-Doc-(Arg)₅-
Gln-(Arg)₃-NH₂;
(SEQ ID NO: 464)
D-Phe-c(Cys-His-D-(Et)Tyr-hArg-Bip-β-Ala-D-Cys)-Thr-(Doc)₂-Tyr-
Gly-(Arg)₅-Gln-(Arg)₃-NH₂;
(SEQ ID NO: 465)
D-Phe-c(Cys-His-D-(Et)Tyr-hArg-Bip-β-Ala-D-Cys)-Thr-(Doc)₂-(Arg)₅-
Gln-(Arg)₃-NH₂;
(SEQ ID NO: 466)
Ac-Nle-c(Cys-D-Ala-His-D-Phe-Arg-Trp-Gly-Cys)-β-Ala-Tyr-Gly-
(Arg)₅-Gln-(Arg)₃-NH₂;
(SEQ ID NO: 467)
Ac-Nle-c(Cys-D-Ala-His-D-Phe-Arg-Trp-Gly-Cys)-β-Ala-(Arg)₅-Gln-
(Arg)₃-NH₂;
(SEQ ID NO: 468)
Nle-c(Cys-His-D-Phe-Arg-Trp-Apn-Cys)-β-Ala-Tyr-Gly-(Arg)₅-Gln-
(Arg)₃-NH₂;
(SEQ ID NO: 469)
Nle-c(Cys-His-D-Phe-Arg-Trp-Apn-Cys)-β-Ala-(Arg)₅-Gln-(Arg)₃-NH₂;
(SEQ ID NO: 470)
Nle-c(Cys-His-D-Phe-Arg-Trp-Apn-Cys)-(β-Ala)₂-Tyr-Gly-(Arg)₅-Gln-
(Arg)₃-NH₂;
(SEQ ID NO: 471)
Nle-c(Cys-His-D-Phe-Arg-Trp-Apn-Cys)-(β-Ala)₂-(Arg)₅-Gln-(Arg)₃-
NH₂;
(SEQ ID NO: 472)
Nle-c(Cys-His-D-Phe-Arg-Trp-Apn-Cys)-β-Ala-Tyr-Gly-(Arg)₅-Gln-
(Arg)₄-NH₂;
(SEQ ID NO: 473)
Nle-c(Cys-His-D-Phe-Arg-Trp-Apn-Cys)-β-Ala-(Arg)₅-Gln-(Arg)₄-NH₂;
(SEQ ID NO: 474)
Nle-c(Cys-His-D-Phe-Arg-Trp-Apn-Cys)-(β-Ala)₂-Tyr-Gly-(Arg)₅-Gln-
(Arg)₄-NH₂;
(SEQ ID NO: 475)
Nle-c(Cys-His-D-Phe-Arg-Trp-Apn-Cys)-(β-Ala)₂-(Arg)₅-Gln-(Arg)₄-
NH₂;
(SEQ ID NO: 476)
Nle-c(Cys-His-D-Phe-Arg-Trp-Apn-Cys)-Doc-Tyr-Gly-(Arg)₅-Gln-
(Arg)₃-NH₂;
(SEQ ID NO: 477)
Nle-c(Cys-His-D-Phe-Arg-Trp-Apn-Cys)-Doc-(Arg)s-Gln-(Arg)₃-NH₂;
(SEQ ID NO: 478)
Nle-c(Cys-His-D-Phe-Arg-Trp-Apn-Cys)-(Doc)₂-Tyr-Gly-(Arg)₅-Gln-
(Arg)₃-NH₂;
(SEQ ID NO: 479)
Nle-c(Cys-His-D-Phe-Arg-Trp-Apn-Cys)-(Doc)₂-(Arg)₅-Gln-(Arg)₃-NH₂;
(SEQ ID NO: 480)
Nle-c(Cys-His-D-Phe-Arg-Trp-Apn-Cys)-Doc-Tyr-Gly-(Arg)₅-Gln-
(Arg)₄-NH₂;
(SEQ ID NO: 481)
Nle-c(Cys-His-D-Phe-Arg-Trp-Apn-Cys)-Doc-(Arg)₅-Gln-(Arg)₄-NH₂;
(SEQ ID NO: 482)
Nle-c(Cys-His-D-Phe-Arg-Trp-Apn-Cys)-(Doc)₂-Tyr-Gly-(Arg)₅-Gln-
(Arg)₄-NH₂;
(SEQ ID NO: 483)
Nle-c(Cys-His-D-Phe-Arg-Trp-Apn-Cys)-(Doc)₂-(Arg)₅-Gln-(Arg)₄-NH₂;
(SEQ ID NO: 484)
Ac-Nle-c(Cys-D-Leu-His-D-Phe-Arg-Trp-Cys)-β-Ala-Tyr-Gly-(Arg)₅-
Gln-(Arg)₃-NH₂;
(SEQ ID NO: 485)
Ac-Nle-c(Cys-D-Leu-His-D-Phe-Arg-Trp-Cys)-β-Ala-(Arg)₅-Gln-(Arg)₃-
NH₂;
(SEQ ID NO: 486)
Ac-Nle-c(Cys-D-Leu-His-D-Phe-Arg-Trp-Cys)-(β-Ala)₂-Tyr-Gly-(Arg)₅-
Gln-(Arg)₃-NH₂;
(SEQ ID NO: 487)
Ac-Nle-c(Cys-D-Leu-His-D-Phe-Arg-Trp-Cys)-(β-Ala)₂-(Arg)₅-Gln-
(Arg)₃-NH₂;
(SEQ ID NO: 488)
Ac-Nle-c(Cys-D-Leu-His-D-Phe-Arg-Trp-Cys)-Doc-Tyr-Gly-(Arg)₅-
Gln-(Arg)₃-NH₂;
(SEQ ID NO: 489)
Ac-Nle-c(Cys-D-Leu-His-D-Phe-Arg-Trp-Cys)-Doc-(Arg)₅-Gln-(Arg)₃-
NH₂;
(SEQ ID NO: 490)
Ac-Nle-c(Cys-D-Leu-His-D-Phe-Arg-Trp-Cys)-(Doc)₂-Tyr-Gly-(Arg)₅-
Gln-(Arg)₃-NH₂;
(SEQ ID NO: 491)
Ac-Nle-c(Cys-D-Leu-His-D-Phe-Arg-Trp-Cys)-(Doc)₂-(Arg)₅-Gln-
(Arg)₃-NH₂;
(SEQ ID NO: 492)
Ac-Nle-c(Cys-D-Leu-His-D-Phe-Arg-Trp-Cys)-β-Ala-Tyr-Gly-(Arg)₅-
Gln-(Arg)₄-NH₂;
(SEQ ID NO: 493)
Ac-Nle-c(Cys-D-Leu-His-D-Phe-Arg-Trp-Cys)-β-Ala-(Arg)₅-Gln-(Arg)₄-
NH₂;
(SEQ ID NO: 494)
Ac-Nle-c(Cys-D-Leu-His-D-Phe-Arg-Trp-Cys)-(β-Ala)₂-Tyr-Gly-(Arg)₅-
Gln-(Arg)₄-NH₂;
(SEQ ID NO: 495)
Ac-Nle-c(Cys-D-Leu-His-D-Phe-Arg-Trp-Cys)-(β-Ala)₂-(Arg)₅-Gln-
(Arg)₄-NH₂;
(SEQ ID NO: 496)
Ac-Nle-c(Cys-D-Leu-His-D-Phe-Arg-Trp-Cys)-Doc-Tyr-Gly-(Arg)₅-
Gln-(Arg)₄-NH₂;
(SEQ ID NO: 497)
Ac-Nle-c(Cys-D-Leu-His-D-Phe-Arg-Trp-Cys)-Doc-(Arg)₅-Gln-(Arg)₄-
NH₂;
(SEQ ID NO: 498)
Ac-Nle-c(Cys-D-Leu-His-D-Phe-Arg-Trp-Cys)-(Doc)₂-Tyr-Gly-(Arg)₅-
Gln-(Arg)₄-NH₂;
(SEQ ID NO: 499)
Ac-Nle-c(Cys-D-Leu-His-D-Phe-Arg-Trp-Cys)-(Doc)₂-(Arg)₅-Gln-
(Arg)₄-NH₂;
(SEQ ID NO: 500)
Ac-Nle-c(Cys-D-Cha-His-D-Phe-Arg-Trp-Cys)-β-Ala-Tyr-Gly-(Arg)₅-
Gln-(Arg)₃-NH₂;
(SEQ ID NO: 501)
Ac-Nle-c(Cys-D-Cha-His-D-Phe-Arg-Trp-Cys)-β-Ala-(Arg)₅-Gln-(Arg)₃-
NH₂;
(SEQ ID NO: 502)
Ac-Nle-c(Cys-D-Cha-His-D-Phe-Arg-Trp-Cys)-(β-Ala)₂-Tyr-Gly-(Arg)₅-
Gln-(Arg)₃-NH₂;
(SEQ ID NO: 503)
Ac-Nle-c(Cys-D-Cha-His-D-Phe-Arg-Trp-Cys)-(β-Ala)₂-(Arg)₅-Gln-
(Arg)₃-NH₂;
(SEQ ID NO: 504)
Ac-Nle-c(Cys-D-Cha-His-D-Phe-Arg-Trp-Cys)-Doc-Tyr-Gly-(Arg)₅-
Gln-(Arg)₃-NH₂;
(SEQ ID NO: 505)
Ac-Nle-c(Cys-D-Cha-His-D-Phe-Arg-Trp-Cys)-Doc-(Arg)₅-Gln-(Arg)₃-
NH₂;
(SEQ ID NO: 506)
Ac-Nle-c(Cys-D-Cha-His-D-Phe-Arg-Trp-Cys)-(Doc)₂-Tyr-Gly-(Arg)₅-
Gln-(Arg)₃-NH₂;
(SEQ ID NO: 507)
Ac-Nle-c(Cys-D-Cha-His-D-Phe-Arg-Trp-Cys)-(Doc)₂-(Arg)₅-Gln-
(Arg)₃-NH₂;
(SEQ ID NO: 508)
Ac-Nle-c(Cys-D-Cha-His-D-Phe-Arg-Trp-Cys)-β-Ala-Tyr-Gly-(Arg)₅-
Gln-(Arg)₄-NH₂;
(SEQ ID NO: 509)
Ac-Nle-c(Cys-D-Cha-His-D-Phe-Arg-Trp-Cys)-β-Ala-(Arg)₅-Gln-(Arg)₄-
NH₂;
(SEQ ID NO: 510)
Ac-Nle-c(Cys-D-Cha-His-D-Phe-Arg-Trp-Cys)-(β-Ala)₂-Tyr-Gly-(Arg)₅-
Gln-(Arg)₄-NH₂;
(SEQ ID NO: 511)
Ac-Nle-c(Cys-D-Cha-His-D-Phe-Arg-Trp-Cys)-(β-Ala)₂-(Arg)₅-Gln-
(Arg)₄-NH₂;
(SEQ ID NO: 512)
Ac-Nle-c(Cys-D-Cha-His-D-Phe-Arg-Trp-Cys)-Doc-Tyr-Gly-(Arg)₅-
Gln-(Arg)₄-NH₂;
(SEQ ID NO: 513)
Ac-Nle-c(Cys-D-Cha-His-D-Phe-Arg-Trp-Cys)-Doc-(Arg)₅-Gln-(Arg)₄-
NH₂;
(SEQ ID NO: 514)
Ac-Nle-c(Cys-D-Cha-His-D-Phe-Arg-Trp-Cys)-(Doc)₂-Tyr-Gly-(Arg)₅-
Gln-(Arg)₄-NH₂;
(SEQ ID NO: 515)
Ac-Nle-c(Cys-D-Cha-His-D-Phe-Arg-Trp-Cys)-(Doc)₂-(Arg)₅-Gln-
(Arg)₄-NH₂;;
(SEQ ID NO: 516)
Nle-c(Cys-His-D-Phe-Arg-Trp-Gaba-Cys)-β-Ala-Tyr-Gly-(Arg)₅-Gln-
(Arg)₃-NH₂;
(SEQ ID NO: 517)
Nle-c(Cys-His-D-Phe-Arg-Trp-Gaba-Cys)-β-Ala-(Arg)₅-Gln-(Arg)₃-NH₂;
(SEQ ID NO: 518)
Nle-c(Cys-His-D-Phe-Arg-Trp-Gaba-Cys)-(β-Ala)₂-Tyr-Gly-(Arg)₅-Gln-
(Arg)₃-NH₂;
(SEQ ID NO: 519)
Nle-c(Cys-His-D-Phe-Arg-Trp-Gaba-Cys)-(β-Ala)₂-(Arg)₅-Gln-(Arg)₃-
NH₂;
(SEQ ID NO: 520)
Nle-c(Cys-His-D-Phe-Arg-Trp-Gaba-Cys)-β-Ala-Tyr-Gly-(Arg)₅-Gln-
(Arg)₄-NH₂;
(SEQ ID NO: 521)
Nle-c(Cys-His-D-Phe-Arg-Trp-Gaba-Cys)-β-Ala-(Arg)₅-Gln-(Arg)₄-NH₂;
(SEQ ID NO: 522)
Nle-c(Cys-His-D-Phe-Arg-Trp-Gaba-Cys)-(β-Ala₎₂-Tyr-Gly-(Arg)₅-Gln-
(Arg)₄-NH₂;
(SEQ ID NO: 523)
Nle-c(Cys-His-D-Phe-Arg-Trp-Gaba-Cys)-(β-Ala)₂-(Arg)₅-Gln-(Arg)₄-
NH₂;
(SEQ ID NO: 524)
Nle-c(Cys-His-D-Phe-Arg-Trp-Gaba-Cys)-Doc-Tyr-Gly-(Arg)₅-Gln-
(Arg)₃-NH₂;
(SEQ ID NO: 525)
Nle-c(Cys-His-D-Phe-Arg-Trp-Gaba-Cys)-Doc-(Arg)₅-Gln-(Arg)₃-NH₂;
(SEQ ID NO: 526)
Nle-c(Cys-His-D-Phe-Arg-Trp-Gaba-Cys)-(Doc)₂-Tyr-Gly-(Arg)₅-Gln-
(Arg)₃-NH₂;
(SEQ ID NO: 527)
Nle-c(Cys-His-D-Phe-Arg-Trp-Gaba-Cys)-(Doc)₂-(Arg)₅-Gln-(Arg)₃-
NH₂;
(SEQ ID NO: 528)
Nle-c(Cys-His-D-Phe-Arg-Trp-Gaba-Cys)-Doc-Tyr-Gly-(Arg)₅-Gln-
(Arg)₄-NH₂;
(SEQ ID NO: 529)
Nle-c(Cys-His-D-Phe-Arg-Trp-Gaba-Cys)-Doc-(Arg)₅-Gln-(Arg)₄-NH₂;
(SEQ ID NO: 530)
Nle-c(Cys-His-D-Phe-Arg-Trp-Gaba-Cys)-(Doc)₂-Tyr-Gly-(Arg)₅-Gln-
(Arg)₄-NH₂;
and
(SEQ ID NO: 531)
Nle-c(Cys-His-D-Phe-Arg-Trp-Gaba-Cys)-(Doc)₂-(Arg)₅-Gln-(Arg)₄-
NH₂,

or pharmaceutically acceptable salts thereof.

[0493] In some embodiments, a compound of Formula (V) is disclosed in International Application Publication Number WO 2007/008684, which is incorporated herein by reference in its entirety.

[0494] In some embodiments, the MC4R agonist is a compound of Formula (VI):

[chemical structure]

or pharmaceutically acceptable salts thereof. In Formula (VI):
[0495] A¹ is the D-isomer of X-Phe or 2-Nal where X is halogen;
[0496] A² is Bal, 1-Nal, 2-Nal, or Trp; and
[0497] A³ is Aib, Ala, β-Ala or Gly,

[0498] In some embodiments, the compound of Formula (VI) is selected from:

(SEQ ID NO: 532)
Ac-c(Cys-Glu-His-D-4-Br-Phe-Arg-Trp-Gly-Cys)-
(Pro)₂-Lys-Asp-NH₂;
(SEQ ID NO: 533)
Ac-c(Cys-Glu-His-D-2-Nal-Arg-Trp-Ala-Cys)-
(Pro)₂-Lys-Asp-NH₂;
(SEQ ID NO: 534)
Ac-c(Cys-Glu-His-D-2-Nal-Arg-2-Nal-Ala-Cys)-
(Pro)₂-Lys-Asp-NH₂;
(SEQ ID NO: 535)
Ac-c(Cys-Glu-His-D-2-Nal-Arg-1-Nal-Ala-Cys)-
(Pro)₂-Lys-Asp-NH₂;
(SEQ ID NO: 536)
Ac-c(Cys-Glu-His-D-2-Nal-Arg-Bal-Ala-Cys)-
(Pro)₂-Lys-Asp-NH₂;
(SEQ ID NO: 537)
Ac-c(Cys-Glu-His-D-2-Nal-Arg-2-Nal-β-Ala-Cys)-
(Pro)₂-Lys-Asp-NH₂;
and
(SEQ ID NO: 538)
Ac-c(Cys-Glu-His-D-2-Nal-Arg-2-Nal-Aib-Cys)-
(Pro)₂-Lys-Asp-NH₂,

or pharmaceutically acceptable salts thereof.

[0499] In an example embodiment, the MC4R agonist is a compound of Formula (VII):

[chemical structure]

or a pharmaceutically acceptable salt thereof wherein:
[0500] X is selected from the group consisting of —CH₂—S—S—CH₂—, —C(CH₃)₂—S—S—CH₂—, —CH₂—S—S—C(CH₃)₂—, —C(CH₃)₂—S—S—C(CH₃)₂—, —(CH₂)₂—S—S—CH₂—, —CH₂—S—S—(CH₂)₂, —(CH₂)₂—S—S—(CH₂)₂—, —C(CH₃)₂—S—S—(CH₂)₂—, —(CH₂)₂—S—S—C(CH₃)₂—, —(CH₂)ᵣ—C(O)—NR⁸—(CH₂)ᵣ— and —(CH₂)ᵣ—NR⁸—C(O)—(CH₂)ₜ—;
[0501] each of R¹ and R⁵ is, independently, H, (C₁-C₁₀)alkyl or substituted (C₁-C₁₀)alkyl;
[0502] each of R² and R³ is, independently, H, (C₁-C₁₀)alkyl, (C₁-C₁₀)heteroalkyl, aryl(C₁-C₅)alkyl, substituted (C₁-C₁₀)alkyl, substituted (C₁-C₁₀)heteroalkyl or substituted aryl(C₁-C₅)alkyl or R² and R³ may be fused together to form a ring;
[0503] R⁴ is OH or NH₂;
[0504] each of R⁶ and R⁷ is, independently, H, (C₁-C₁₀)alkyl or substituted (C₁-C₁₀)alkyl;
[0505] A¹ is an L- or D-amino acid or deleted;
[0506] A² is H is, 2-Pal, 3-Pal, 4-Pal, (X¹, X², X³, X⁴, X⁵)Phe, Taz, 2-Thi or 3-Thi;
[0507] A³ is D-Bal, D-1-Nal, D-2-Nal, D-Phe or D-(X¹, X², X³, X⁴, X⁵)Phe;
[0508] A⁴ is Arg, hArg, Dab, Dap, Lys or Orn;
[0509] A⁵ is Bal, 1-Nal, 2-Nal, (X¹, X², X³, X⁴, X⁵)Phe or Trp;
[0510] r is, independently for each occurrence thereof, 1, 2, 3, 4 or 5; and
[0511] t is, independently for each occurrence thereof, 1 or 2;
   or pharmaceutically acceptable salts thereof.

[0512] In an example embodiment of the compounds of Formula (VII),
[0513] A¹ is Ala, D-Ala, Asn, Asp, Gln, Glu or Gly.

[0514] Example compounds according to Formula (VII) include:

(SEQ ID NO: 539)
c[Hydantoin(C(O)-(Nle-Cys))-D-Ala-His-
D-Phe-Arg-Trp-Cys]-NH₂;
(SEQ ID NO: 540)
c[Hydantoin(C(O)-(Ala-Cys))-D-Ala-His-
D-Phe-Arg-Trp-Cys]-NH₂;
(SEQ ID NO: 541)
c[Hydantoin(C(O)-(D-Ala-Cys))-D-Ala-His-
D-Phe-Arg-Trp-Cys]-NH₂;
(SEQ ID NO: 542)
c[Hydantoin(C(O)-(Aib-Cys))-D-Ala-His-
D-Phe-Arg-Trp-Cys]-NH₂;
(SEQ ID NO: 543)
c[Hydantoin(C(O)-(Val-Cys))-D-Ala-His-
D-Phe-Arg-Trp-Cys]-NH₂;
(SEQ ID NO: 544)
c[Hydantoin(C(O)-(Abu-Cys))-D-Ala-His-
D-Phe-Arg-Trp-Cys]-NH₂;
(SEQ ID NO: 545)
c[Hydantoin(C(O)-(Leu-Cys))-D-Ala-His-
D-Phe-Arg-Trp-Cys]-NH₂;
(SEQ ID NO: 546)
c[Hydantoin(C(O)-(Ile-Cys))-D-Ala-His-
D-Phe-Arg-Trp-Cys]-NH₂;
(SEQ ID NO: 547)
c[Hydantoin(C(O)-(Cha-Cys))-D-Ala-His-
D-Phe-Arg-Trp-Cys]-NH₂;
(SEQ ID NO: 548)
c[Hydantoin(C(O)-(A6c-Cys))-D-Ala-His-
D-Phe-Arg-Trp-Cys]-NH₂;
(SEQ ID NO: 549)
c[Hydantoin(C(O)-(Phe-Cys))-D-Ala-His-
D-Phe-Arg-Trp-Cys]-NH₂;
(SEQ ID NO: 550)
c[Hydantoin(C(O)-(Gly-Cys))-D-Ala-His-
D-Phe-Arg-Trp-Cys]-NH₂,
and
(SEQ ID NO: 551)
c[Hydantoin(C(O)-(Gly-Cys))-Glu-His-
D-Phe-Arg-Trp-Cys]-NH₂,

or pharmaceutically acceptable salts thereof.

[0515] In some embodiments, a compound of Formula (VII) is disclosed in International Application Publication Number WO2008/147556, which is incorporated herein by reference in its entirety.

[0516] In some embodiments, the MC4R agonist is a compound of Formula (VIII):

[chemical structure]

or a pharmaceutically acceptable salt thereof wherein:
[0517] A⁰ is an aromatic amino acid
[0518] A¹ is Acc, HN—(CH₂)ₘ—C(O), an L- or D-amino acid;
[0519] A² is Asp, Cys, D-Cys, hCys, D-hCys, Glu, Pen, or D-Pen;
[0520] A³ is Aib, Ala, β-Ala, Gaba, Gly or a D-amino acid;
[0521] A⁴ is H is, 2-Pal, 3-Pal, 4-Pal, (XI, X², X³, X⁴, X⁵)Phe, Taz, 2-Thi, or 3-Thi;
[0522] A⁵ is D-Bal, D-1-Nal, D-2-Nal, D-Phe, L-Phe, D-(X¹, X², X³, X⁴, X⁵)Phe, L-Phe, D-Trp or D-(Et)Tyr;
[0523] A⁶ is Arg, hArg, Dab, Dap, Lys, Orn, or HN—CH((CH₂)ₙ—N(R⁴R⁵))—C(O);
[0524] A⁷ is Bal, D-Bal, Bip, D-Bip, 1-Nal, D-1-Nal, 2-Nal, D-2-Nal, or D-Trp;
[0525] A⁸ is Acc, Aha, Ahx, Ala, D-Ala, 3-Ala, Apn, Gaba, Gly, HN—(CH₂)ₛ—C(O), or deleted;
[0526] A⁹ is Cys, D-Cys, hCys, D-hCys, Dab, Dap, Lys, Orn, Pen, or D-Pen;
[0527] A¹⁰ is Acc, HN—(CH₂)ₜ—C(O), L- or D-amino acid, or deleted;
[0528] R¹ is OH, or NH₂;
[0529] each of R² and R³ is, independently for each occurrence selected from the group consisting of H, (C₁-C₃₀)alkyl, (C₁-C₃₀)heteroalkyl, (C₁-C₃₀)acyl, (C₂-C₃₀)alkenyl, (C₂-C₃₀)alkynyl, aryl(C₁-C₃₀)alkyl, aryl(C₁-C₃₀)acyl, substituted (C₁-C₃₀)alkyl, substituted (C₁-C₃₀)heteroalkyl, substituted (C₁-C₃₀)acyl, substituted (C₂-C₃₀)alkenyl, substituted (C₂-C₃₀)alkynyl, substituted aryl(C₁-C₃₀)alkyl, and substituted aryl(C₁-C₃₀)acyl;
[0530] each of R⁴ and R⁵ is, independently for each occurrence, H, (C₁-C₄₀)alkyl, (C₁-C₄₀)heteroalkyl, (C₁-C₄₀)acyl, (C₂-C₄₀)alkenyl, (C₂-C₄₀)alkynyl, aryl(C₁-C₄₀)alkyl, aryl(C₁-C₄₀)acyl, substituted (C₁-C₄₀)alkyl, substituted (C₁-C₄₀)heteroalkyl, substituted (C₁-C₄₀)acyl, substituted (C₂-C₄₀)alkenyl, substituted (C₂-C₄₀)alkynyl, substituted aryl(C₁-C₄₀)allyl, substituted aryl(C₁-C₄₀)acyl, (C₁-C₄₀)alkylsulfonyl, or —C(NH)—NH₂;
[0531] m is, independently for each occurrence, 1, 2, 3, 4, 5, 6 or 7;
[0532] n is, independently for each occurrence, 1, 2, 3, 4 or 5;
[0533] s is, independently for each occurrence, 1, 2, 3, 4, 5, 6, or 7;
[0534] t is, independently for each occurrence, 1, 2, 3, 4, 5, 6, or 7;
[0535] X¹, X², X³, X⁴, and X⁵ each is, independently for each occurrence, H, F, Cl, Br, I, (C₁-C₁₀)alkyl, substituted (C₁-C₁₀)alkyl, (C₂-C₁₀)alkenyl, substituted (C₂-C₁₀)alkenyl, (C₂-C₁₀)alkynyl, substituted (C₂-C₁₀)alkynyl, aryl, substituted aryl, OH, NH₂, NO₂, or CN.

[0536] In example embodiments of Formula (VIII)
[0537] (I) when R⁴ is (C₁-C₄₀)acyl, aryl(C₁-C₄₀)acyl, substituted (C₁-C₄₀)acyl, substituted aryl(C₁-C₄₀)acyl, (C₁-C₄₀)alkylsulfonyl, or —C(NH)—NH₂, then R⁵ is H or (C₁-C₄₀)alkyl, (C₁-C₄₀)heteroalkyl, (C₂-C₄₀)alkenyl, (C₂-C₄₀)alkynyl, aryl(C₁-C₄₀)alkyl, substituted (C₁-C₄₀)alkyl, substituted (C₁-C₄₀)heteroalkyl, substituted (C₂-C₄₀)alkenyl, substituted (C₂-C₄₀)alkynyl, or substituted aryl(C₁-C₄₀)alkyl;
[0538] (II) when R² is (C₁-C₃₀)acyl, aryl(C₁-C₃₀)acyl, substituted (C₁-C₃₀)acyl, or substituted aryl(C₁-C₃₀)acyl, then R³ is H, (C₁-C₃₀)alkyl, (C₁-C₃₀)heteroalkyl, (C₂-C₃₀)alkenyl, (C₂-C₃₀)alkynyl, aryl(C₁-C₃₀)alkyl, substituted (C₁-C₃₀)alkyl, substituted (C₁-C₃₀)heteroalkyl, substituted (C₂-C₃₀)alkenyl, substituted (C₂-C₃₀)alkynyl, or substituted aryl(C₁-C₃₀)alkyl;
[0539] (III) when A² is Cys, D-Cys, hCys, D-hCys, Pen, or D-Pen, then A⁹ is Cys, D-Cys, hCys, D-hCys, Pen, or D-Pen;
[0540] (IV) when A² is Asp or Glu, then A⁹ is Dab, Dap, Orn, or Lys;
[0541] (V) when A⁸ is Ala or Gly, then A¹ is not Nle; or pharmaceutically acceptable salts thereof.

[0542] In example embodiments of compounds of Formula (VIII):
[0543] A⁰ is 1-Nal, 2-Nal, H is, Pff, Phe, Trp, or Tyr; A¹ is Arg; A² is Cys; A³ is D-Ala; A⁴ is H; A⁵ is D-Phe; A⁶ is Arg; A⁷ is Trp; A⁸ is deleted; A⁹ is Cys; and A¹⁰ is deleted; or pharmaceutically acceptable salts thereof.

[0544] Particular compounds of the immediately foregoing group of Formula (VIII) compounds include:

(SEQ ID NO: 552)
Ac-Tyr-Arg-c(Cys-D-Ala-His-
D-Phe-Arg-Trp-Cys)-NH₂;
(SEQ ID NO: 553)
Ac-2-Nal-Arg-c(Cys-D-Ala-His-
D-Phe-Arg-Trp-Cys)-NH₂;
(SEQ ID NO: 554)
Ac-1-Nal-Arg-c(Cys-D-Ala-His-
D-Phe-Arg-Trp-Cys)-NH₂;
(SEQ ID NO: 555)
Ac-Phe-Arg-c(Cys-D-Ala-His-
D-Phe-Arg-Trp-Cys)-NH₂;
(SEQ ID NO: 556)
Ac-Trp-Arg-c(Cys-D-Ala-His-
D-Phe-Arg-Trp-Cys)-NH₂;
(SEQ ID NO: 557)
Ac-Pff-Arg-c(Cys-D-Ala-His-
D-Phe-Arg-Trp-Cys)-NH₂;
(SEQ ID NO: 558)
H-His-Arg-c(Cys-D-Ala-His-
D-Phe-Arg-Trp-Cys)-NH₂;
and
(SEQ ID NO: 559)
Ac-His-Arg-c(Cys-D-Ala-His-
D-Phe-Arg-Trp-Cys)-NH₂,

or a pharmaceutically acceptable salt thereof.

[0545] In some embodiments, the MC4R agonist is an agonist described in WO2014/144260 A1, incorporated herein by reference.

[0546] In one example embodiment, an MC4R agonist is a compound represented by formula (IX):

[chemical structure]

or a pharmaceutically acceptable salt thereof, wherein:
[0547] R¹ is H, or a (C₁-C₆)acyl;
[0548] R² is, —NR³R⁴, or —OR⁵ wherein R³, R⁴, and R⁵ are each independently is H or a (C₁-C₆)alkyl;
[0549] A¹ is an amino acid residue selected from Arg, Lys, Orn, His, Nle, Phe, Val, Leu, Trp, Tyr, Ala, Ser, Thr, Gln, Asn, Asp, Glu, or TzAla; or
[0550] A¹ is a moiety selected from an optionally substituted —(C₁-C₁₂)-alkyl, an optionally substituted —(C₆-C₁₈)-aryl, an optionally substituted —(C₅-C₁₈)-heteroaryl, an aralkyl wherein the aryl portion is an optionally substituted (C₆-C₁₈)aryl, and the alkyl portion is an optionally substituted (C₁-C₁₂)alkyl, or a heteroaralkyl, wherein the heteroaryl portion is an optionally substituted (C₅-C₁₈)heteroaryl, and the alkyl portion is an optionally substituted (C₁-C₁₂)alkyl;
[0551] A² and A⁸ is each independently an amino acid residue selected from Cys, hCys, Pen, Asp, Glu, Lys, Om, Dbu, or Dpr, wherein A² and A⁸ are pairwise selected so as to be able to form covalent bond between their respective side chains;
[0552] A³ is absent or is an amino acid residue selected from Ala, Tle, Val, Leu, Ile, Cha, Pro, Ser, Thr, Lys, Arg, His, Phe, Gln, Sar, Gly, Asn, Aib, or residue Y, wherein Y is an amino acid selected from amino acids represented by the following structural formulas

[chemical structure]

[0553] wherein:
   [0554] R¹¹ and R¹², each independently, is H, —CH₃, phenyl, or benzyl;
   [0555] R²¹, R²², R²³, and R²⁴, each independently is H, —CH₃, —CF₃, phenyl, benzyl, F, Cl, Br, I, —OCH₃, or —OH;
   [0556] R³¹, R³², R³³, R³⁴, R⁴¹, R⁴², and R⁴³, each independently is H, —CH₃, —CF₃, phenyl, benzyl, F, Cl, Br, I, —OCH₃, or —OH;
   [0557] A⁴ is absent or is an amino acid residue selected from Atc, Ala, QAla, Aib, Sar, Ser, Thr, Pro, Hyp, Asn, Gln, an optionally substituted His, Trp, Tyr, Lys, Arg, sChp, or residue X, where the X is an amino acid selected from amino acids represented by the following formulas:

[chemical structure]

[0558] wherein:
   [0559] R⁵¹ and R⁵², each independently, is H, —CH₃, phenyl, or benzyl;
   [0560] R⁶¹, R⁶², R⁶³, and R⁶⁴, each independently is H, —CH₃, —CF₃, phenyl, benzyl, F, Cl, Br, I, —OCH₃, or —OH;
   [0561] R⁷¹, R⁷², R⁷³, R⁷⁴, R⁸¹, R⁸², and R⁸³, each independently is H, —CH₃, —CF₃, phenyl, benzyl, F, Cl, Br, I, —OCH₃, or —OH;
   [0562] A⁵ is an optionally substituted Phe, an optionally substituted 1-Nal, or an optionally substituted 2-Nal;
   [0563] A⁶ is Arg; and
   [0564] A⁷ is Trp,
[0565] wherein any amino acid residue is either in L- or in D-configuration.

[0566] Exemplary compound of Formula (IX) include:

(SEQ ID NO: 560)
Ac-Arg-c(Cys-D-Ala-His-D-Phe(p-F)-Arg-Trp-
Cys)-NH₂;
(SEQ ID NO: 561)
Ac-Arg-c(Cys-D-Ala-Pro-D-Phe-Arg-Trp-
Cys)-NH₂;
(SEQ ID NO: 562)
Ac-Arg-c(Cys-D-Ala-Pro-D-Phe(p-F)-Arg-Trp-
Cys)-NH₂;
(SEQ ID NO: 563)
Ac-Arg-c(Cys-D-Ala-Pro-D-Phe(p-F)-Arg-Trp-
Cys)-NH₂;
(SEQ ID NO: 564)
Ac-Arg-c(Cys-D-Ala-Ser-D-Phe(p-F)-Arg-Trp-
Cys)-NH₂;
(SEQ ID NO: 565)
Ac-Arg-c(Cys-D-Ala-Thr-D-Phe(p-CN)-Arg-Trp-
Cys)-NH₂;
(SEQ ID NO: 566)
Ac-Arg-c(Cys-D-Ala-Asn-D-Phe-Arg-Trp-
Cys)-NH₂;
(SEQ ID NO: 567)
Ac-Arg-c(Cys-D-Ala-Gln-D-Phe-Arg-Trp-
Cys)-NH₂;
(SEQ ID NO: 568)
Ac-Arg-c(Cys-D-Ala-Trp-D-Phe-Arg-Trp-
Cys)-NH₂;
(SEQ ID NO: 569)
Ac-Arg-c(Cys-D-Val-His-D-Phe-Arg-Trp-
Cys)-NH₂;
(SEQ ID NO: 570)
Ac-Arg-c(Cys-D-Val-Gln-D-Phe-Arg-Trp-
Cys)-NH₂;
(SEQ ID NO: 571)
Ac-Arg-c(Cys-D-Val-Pro-D-Phe-Arg-Trp-
Cys)-NH₂;
and
(SEQ ID NO: 572)
Ac-Arg-c(Cys-D-Ser-Pro-D-Phe-Arg-Trp-
Cys)-NH₂,

or a pharmaceutically acceptable salt thereof.

[0567] In yet another embodiment, the polypeptides of the present invention include any one of the following structural formulas:

(SEQ ID NO: 573)
Ac-Arg-c(hCys-D-Ala-D-Phe-Arg-Trp-Cys)-NH₂;
(SEQ ID NO: 574)
Ac-Arg-c(hCys-Ala-D-Phe-Arg-Trp-Cys)-NH₂;
(SEQ ID NO: 575)
Ac-Arg-c(hCys-Ala-D-Phe-Arg-Trp-Cys)-OH;
(SEQ ID NO: 576)
Ac-Arg-c(Cys-D-Ala-D-Phe-Arg-Trp-hCys)-NH₂;
(SEQ ID NO: 577)
Ac-Arg-c(Pen-D-Ala-D-Phe-Arg-Trp-hCys)-NH₂;
(SEQ ID NO: 578)
Ac-Arg-c(hCys-D-Ala-D-Phe(p-F)-Arg-Trp-
Cys)-NH₂;
(SEQ ID NO: 579)
Ac-Arg-c(hCys-Pro-D-Phe-Arg-Trp-Cys)-NH₂;
(SEQ ID NO: 580)
Ac-Nle-c(hCys-Pro-D-Phe-Arg-Trp-Cys)-NH₂;
(SEQ ID NO: 581)
Arg-c(hCys-Pro-D-Phe-Arg-Trp-Cys)-NH₂;
(SEQ ID NO: 582)
CH₃-(CH₂)₄-CO-c(hCys-Pro-D-Phe-Arg-Trp-Cys)-NH₂;
and
(SEQ ID NO: 583)
Benzyl-CO-c(hCys-Pro-D-Phe-Arg-Trp-Cys)-NH₂,

or a pharmaceutically acceptable salt thereof.

[0568] In a further embodiment, the polypeptides of the present invention include the polypeptide represented by any one of the following structural formulas:

(SEQ ID NO: 584)
Ac-Arg-c(Asp-D-Ala-D-Phe-Arg-Trp-Dbu)-NH₂;
(SEQ ID NO: 585)
Ac-Arg-c(Glu-D-Ala-D-Phe-Arg-Trp-Dpr)-NH₂;
(SEQ ID NO: 586)
Ac-Arg-c(Glu-Ala-D-Phe-Arg-Trp-Dpr)-NH₂;
(SEQ ID NO: 587)
Ac-Arg-c(Dpr-D-Ala-D-Phe-Arg-Trp-Glu)-NH₂;
(SEQ ID NO: 588)
Ac-Arg-c(Dpr-D-Ala-D-Phe(4-F)-Arg-Trp-
Glu)-NH₂;
(SEQ ID NO: 589)
Ac-Arg-c(Dpr-Ala-D-Phe-Arg-Trp-Glu)-NH₂;
(SEQ ID NO: 590)
Ac-Arg-c(Dpr-Ala-D-Phe-Arg-Trp-Glu)-OH;
(SEQ ID NO: 591)
Ac-Nle-c(Dpr-Ala-D-Phe-Arg-Trp-Glu)-NH₂;
(SEQ ID NO: 592)
Arg-c(Dpr-Ala-D-Phe-Arg-Trp-Glu)-NH₂;
(SEQ ID NO: 593)
CH₃-(CH₂)₄-CO-c(Dpr-Ala-D-Phe-Arg-Trp-Glu)-NH₂;
or
(SEQ ID NO: 594)
Benzyl-CO-c(Dpr-Ala-D-Phe-Arg-Trp-
Glu)-NH₂,

or a pharmaceutically acceptable salt thereof.

[0569] In yet another embodiment, the polypeptides of the present invention include a polypeptide represented by Formula (IV), wherein A⁴ is an amino acid residue selected from Atc, Ala, QAla, Aib, Sar, Ser, Thr, Pro, Hyp, Asn, Gln, a substituted His, Trp, Tyr, Lys, Arg, sChp, or residue X. Examples of such peptides include peptides represented by any one of the following structural formulas:

(SEQ ID NO: 595)
Ac-Arg-c(Cys-D-Ala-His(3-Me)-D-Phe-Arg-
Trp-Cys)-NH₂;
(SEQ ID NO: 596)
Ac-Arg-c(Cys-D-Ala-His(1-Me)-D-Phe-Arg-
Trp-Cys)-NH₂;
(SEQ ID NO: 568)
Ac-Arg-c(Cys-D-Ala-Trp-D-Phe-Arg-Trp-
Cys)-NH₂;
(SEQ ID NO: 567)
Ac-Arg-c(Cys-D-Ala-Gln-D-Phe-Arg-Trp-
Cys)-NH₂;
(SEQ ID NO: 566)
Ac-Arg-c(Cys-D-Ala-Asn-D-Phe-Arg-Trp-
Cys)-NH₂;
(SEQ ID NO: 597)
Ac-Arg-c(Cys-D-Ala-Arg-D-Phe-Arg-Trp-
Cys)-NH₂;
(SEQ ID NO: 598)
Ac-Arg-c(Cys-D-Ala-Tyr-D-Phe-Arg-Trp-
Cys)-NH₂;
(SEQ ID NO: 599)
Ac-Arg- c(Cys-D-Ala-D-Pro-D-Phe-Arg-
Trp-Cys)-NH₂;
(SEQ ID NO: 561)
Ac-Arg-c(Cys-D-Ala-Pro-D-Phe-Arg-Trp-
Cys)-NH₂;
(SEQ ID NO: 563)
Ac-Arg-c(Cys-D-Ala-Pro-D-Phe(p-F)-Arg-Trp-
Cys)-NH₂;
(SEQ ID NO: 600)
Ac-Arg- c(Cys-D-Ala-Atc-D-Phe-Arg-Trp-
Cys)-NH₂;
(SEQ ID NO: 601)
Ac-Arg- c(Cys-D-Ala-QAla-D-Phe-Arg-Trp-
Cys)-NH₂;
(SEQ ID NO: 602)
Ac-Arg- c(Cys-D-Ala-sChp-D-Phe-Arg-Trp-
Cys)-NH₂;
or
(SEQ ID NO: 603)
Ac-Arg- c(Cys-D-Ala-X-D-Phe-Arg-Trp-
Cys)-NH₂,

or a pharmaceutically acceptable salt thereof.

[0570] In example embodiments, the polypeptides of the present invention include a polypeptide represented by any one of the following structural formulas:

(SEQ ID NO: 574)
Ac-Arg-c(hCys-Ala-D-Phe-Arg-Trp-Cys)-NH₂;
(SEQ ID NO: 573)
Ac-Arg-c(hCys-D-Ala-D-Phe-Arg-Trp-Cys)-NH₂;
(SEQ ID NO: 604)
Ac-Arg-c(hCys-D-Ala-D-Phe-Arg-Trp-Pen)-NH₂;
(SEQ ID NO: 585)
Ac-Arg-c(Glu-D-Ala-D-Phe-Arg-Trp-Dpr)-NH₂;
(SEQ ID NO: 586)
Ac-Arg-c(Glu-Ala-D-Phe-Arg-Trp-Dpr)-NH₂;
(SEQ ID NO: 605)
Ac-Arg-c(hCys-Aib-D-Phe-Arg-Trp-Cys)-NH₂;
(SEQ ID NO: 606)
Ac-Arg-c(hCys-Sar-D-Phe-Arg-Trp-Cys)-NH₂;
(SEQ ID NO: 607)
Ac-Arg-c(hCys-Val-D-Phe-Arg-Trp-Cys)-NH₂;
(SEQ ID NO: 608)
Ac-Arg-c(hCys-D-Val-D-Phe-Arg-Trp-Cys)-NH₂;
(SEQ ID NO: 609)
Ac-Arg-c(hCys-Gln-D-Phe-Arg-Trp-Cys)-NH₂;
(SEQ ID NO: 610)
Ac-Arg-c(hCys-D-Gln-D-Phe-Arg-Trp-Cys)-NH₂;
(SEQ ID NO: 611)
Ac-Arg-c(hCys-Ala-D-Phe-Arg-Trp-Pen)-NH₂;
(SEQ ID NO: 612)
Ac-Arg-c(D-Pen-D-Ala-D-Phe-Arg-Trp-hCys)-NH₂;
(SEQ ID NO: 576)
Ac-Arg-c(Cys-D-Ala-D-Phe-Arg-Trp-hCys)-NH₂;
(SEQ ID NO: 613)
Ac-Arg-c(Pen-D-Ala-D-Phe-Arg-Trp-hCys)-NH₂;
(SEQ ID NO: 614)
Ac-Arg-c(D-hCys-D-Ala-D-Phe-Arg-Trp-Cys)-NH₂;
(SEQ ID NO: 579)
Ac-Arg-c(hCys-Pro-D-Phe-Arg-Trp-Cys)-NH₂;
or
(SEQ ID NO: 615)
Ac-Arg-c(hCys-D-Pro-D-Phe-Arg-Trp-Cys)-NH₂,

or a pharmaceutically acceptable salt thereof.

[0571] In another embodiment, the polypeptides of the present invention include polypeptides represented by Formula (IV), wherein A³ is an amino acid residue selected from Tle, Val, Leu, Ile, Cha, Pro, Ser, Thr, Lys, Arg, His, Phe, Gln, Sar, Gly, Asn, or Aib; and A⁴ is an amino acid residue selected from Atc, Ala, QAla, Aib, Sar, Ser, Thr, Pro, Hyp, Asn, Gln, a substituted His, Trp, Tyr, Lys, Arg, sChp, or residue X. Examples of such polypeptides are polypeptides represented by any one of the following structural formulas:

(SEQ ID NO: 616)
Ac-Arg-c(Cys-Val-Gln-D-Phe-Arg-Trp-Cys)-NH₂;
(SEQ ID NO: 570)
Ac-Arg-c(Cys-D-Val-Gln-D-Phe-Arg-Trp-Cys)-NH₂;
or
(SEQ ID NO: 617)
Ac-Arg-c(Cys-D-Val-His(1-Me)-D-Phe-Arg-Trp-Cys)-NH₂,

or a pharmaceutically acceptable salt thereof.

[0572] In a further embodiment, the polypeptides of the present invention include a polypeptide represented by any one of the following structural formulas:

(SEQ ID NO: 618)
Ac-TzAla-c(Cys-Ala-Gln-D-Phe-Arg-Trp-Cys)-NH₂;
or
(SEQ ID NO: 619)
Ac-Glu-c(Cys-Ala-His-D-Phe-Arg-Trp-Cys)-NH₂,

or a pharmaceutically acceptable salt thereof.

[0573] In yet another embodiment, the polypeptides of the present invention include a polypeptide represented by any one of the following structural formulas:

(SEQ ID NO: 596)
Ac-Arg-c(Cys-D-Ala-His(1-Me)-D-Phe-Arg-Trp-Cys)-NH₂;
(SEQ ID NO: 567)
Ac-Arg-c(Cys-D-Ala-Gln-D-Phe-Arg-Trp-Cys)-NH₂;
or
(SEQ ID NO: 566)
Ac-Arg-c(Cys-D-Ala-Asn-D-Phe-Arg-Trp-Cys)-NH₂,

or a pharmaceutically acceptable salt thereof.

[0574] In a further embodiment, the polypeptides of the present invention include a polypeptide represented by any one of the following structural formulas:

(SEQ ID NO: 620)
Ac-Arg-c(Cys-D-Leu-His-D-Phe-Arg-Trp-Cys)-NH₂;
(SEQ ID NO: 621)
Ac-Arg-c(Cys-D-Ile-His-D-Phe-Arg-Trp-Cys)-NH₂;
(SEQ ID NO: 622)
Ac-Arg-c(Cys-D-Tle-His-D-Phe-Arg-Trp-Cys)-NH₂;
or
(SEQ ID NO: 569)
Ac-Arg-c(Cys-D-Val-His-D-Phe-Arg-Trp-Cys)-NH₂,

or a pharmaceutically acceptable salt thereof.

[0575] In a further embodiment, the polypeptides of the present invention include a polypeptide represented by any one of the following structural formulas:

(SEQ ID NO: 623)
Ac-Arg-c(Cys-D-Ala-His(1-Me)-D-2-Nal-Arg-Trp-Cys)-
NH₂;
(SEQ ID NO: 624)
Ac-Arg-c(Cys-D-Ala-Gln-D-2-Nal-Arg-Trp-Cys)-NH₂;
or
(SEQ ID NO: 625)
Ac-Arg-c(Cys-D-Ala-Asn-D-2-Nal-Arg-Trp-Cys)-NH₂,

or a pharmaceutically acceptable salt thereof.

[0576] In a further embodiment, the polypeptides of the present invention include a polypeptide represented by any one of the following structural formulas:

(SEQ ID NO: 626)
Ac-Arg-c(Cys-D-Ala-His(1-Me)-D-Phe-Arg-Trp-Cys)-
OH;
(SEQ ID NO: 627)
Ac-Arg-c(Cys-D-Ala-Gln-D-Phe-Arg-Trp-Cys)-OH;
or
(SEQ ID NO: 628)
Ac-Arg-c(Cys-D-Ala-Asn-D-Phe-Arg-Trp-Cys)-OH,

or a pharmaceutically acceptable salt thereof.

[0577] In one example embodiment, an MC4R agonist is a compound represented by Formula (X):

[chemical structure]

or a pharmaceutically acceptable salt thereof. In Formula (X), the chemical substituents are defined as follows:
[0578] R₁ is —NH—C(O)— or —C(O)—NH—;
[0579] R₂ is —H, —CH₂—, or, R₂, together with R₃, forms a pyrrolidine ring optionally substituted with —OH;
[0580] R₃ is —(CH₂)₂— if R₂ is —CH₂—, and otherwise R₃ is selected from

[chemical structure]

[0581] R^{4a}, R^{4b}, and R^{4c} are each independently selected from hydrogen, halo, (C₁-C₁₀)alkyl-halo, (C₁-C₁₀)alkyl-dihalo, (C₁-C₁₀)alkyl-trihalo, (C₁-C₁₀)alkyl, (C₁-C₁₀)alkoxy, (C₁—C₁₀)alkylthio, aryl, aryloxy, nitro, nitrile, sulfonamide, amino, hydroxyl, carboxy, and alkoxy-carbonyl. In one example embodiment, R^{4a}, R^{4b}, and R^{4c} is not hydrogen.
[0582] R⁵ is —OH or —N(R^{6a})(R^{6b});
[0583] R^{6a} and R^{6b} are each independently H or C₁ to C₄ linear, branched or cyclic alkyl chain;
[0584] R⁷ is —H or —C(O)—NH₂;
[0585] w is in each instance independently 0 to 5;
[0586] x is 1 to 5;
[0587] y is 1 to 5;
[0588] z is in each instance independently 1 to 5.

[0589] An example of a compound of Formula (X) is a cyclic peptide defined by Formula (XI):

[chemical structure]

or a pharmaceutically acceptable salt thereof.

[0590] In one example embodiment, the MC4R agonist is Ac-Arg-c(Cys-D-Ala-His-D-Phe-Arg-Trp-Cys)-NH₂ (SEQ ID NO: 140) or a pharmaceutically acceptable salt thereof. In another example embodiment, the MC4R agonist is Hydantoin(C(O)-(Arg-Gly))-c(Cys-Glu-His-D-Phe-Arg-Trp-Cys)-NH₂ (SEQ ID NO: 148) or a pharmaceutically acceptable salt thereof.

[0591] In some embodiments, the MC4R agonist is an agonist described in WO2014/144260 A1, incorporated herein by reference.

[0592] In one example embodiment, the MC4 agonist is a compound represented by Formula (XII):

[chemical structure]

[0593] Aaa and Bbb are selected from Cys, hCys, Pen capable of establishing a disulfide bridge; or Glu, Asp, Lys, Orn, Dpr, Dbu capable of establishing a lactam bridge;
[0594] Xxx is Asn, Gln, Ser, Thr;
[0595] Yyy is Lys, Arg, D-Lys, D-Arg;
[0596] A1 is H, Ac;
[0597] A₂ is OH, NH₂;

[0598] In embodiments, the MC4R agonist is chosen from one or more of the following compounds, (or pharmaceutically acceptable salt thereof):

(SEQ ID NO: 629)
Ac-Arg-c(hCys-Asn-D-Phe-Arg-Trp-Pen)-NH₂;
(SEQ ID NO: 630)
Ac-Arg-c(hCys-Gln-D-Phe-Arg-Trp-Pen)-NH₂;
(SEQ ID NO: 631)
Ac-Arg-c(hCys-Ser-D-Phe-Arg-Trp-Pen)-NH₂;
(SEQ ID NO: 632)
Ac-Arg-c(hCys-Thr-D-Phe-Arg-Trp-Pen)-NH₂;
(SEQ ID NO: 633)
Ac-Arg-c(Glu-Gln-D-Phe-Arg-Trp-Dpr)-NH₂;
(SEQ ID NO: 634)
Ac-Arg-c(hCys-Asn-D-Phe-Arg-Trp-Pen)-OH;
(SEQ ID NO: 635)
H-Arg-c(hCys-Asn-D-Phe-Arg-Trp-Pen)-NH₂;
(SEQ ID NO: 636)
H-Arg-c(hCys-Asn-D-Phe-Arg-Trp-Pen)-OH;
(SEQ ID NO: 637)
Ac-D-Arg-c(hCys-Asn-D-Phe-Arg-Trp-Pen)-NH₂;
(SEQ ID NO: 638)
H-D-Arg-c(hCys-Asn-D-Phe-Arg-Trp-Pen)-NH₂;
(SEQ ID NO: 639)
Ac-D-Arg-c(hCys-Asn-D-Phe-Arg-Trp-Pen)-OH;
(SEQ ID NO: 640)
H-D-Arg-c(hCys-Asn-D-Phe-Arg-Trp-Pen)-OH;
(SEQ ID NO: 641)
Ac-Lys-c(hCys-Asn-D-Phe-Arg-Trp-Pen)-NH₂;
(SEQ ID NO: 642)
Ac-Lys-c(hCys-Asn-D-Phe-Arg-Trp-Pen)-OH;
(SEQ ID NO: 643)
H-Lys-c(hCys-Asn-D-Phe-Arg-Trp-Pen)-NH₂;
(SEQ ID NO: 644)
H-Lys-c(hCys-Asn-D-Phe-Arg-Trp-Pen)-OH;
(SEQ ID NO: 645)
Ac-D-Lys-c(hCys-Asn-D-Phe-Arg-Trp-Pen)-NH₂;
(SEQ ID NO: 646)
H-D-Lys-c(hCys-Asn-D-Phe-Arg-Trp-Pen)-NH₂;
(SEQ ID NO: 647)
Ac-D-Lys-c(hCys-Asn-D-Phe-Arg-Trp-Pen)-OH;
(SEQ ID NO: 648)
H-D-Lys-c(hCys-Asn-D-Phe-Arg-Trp-Pen)-OH;
(SEQ ID NO: 649)
Ac-Arg-c(hCys-Gln-D-Phe-Arg-Trp-Pen)-OH;
(SEQ ID NO: 650)
H-Arg-c(hCys-Gln-D-Phe-Arg-Trp-Pen)-NH₂;
(SEQ ID NO: 651)
H-Arg-c(hCys-Gln-D-Phe-Arg-Trp-Pen)-OH;
(SEQ ID NO: 652)
Ac-D-Arg-c(hCys-Gln-D-Phe-Arg-Trp-Pen)-NH₂;
(SEQ ID NO: 653)
H-D-Arg-c(hCys-Gln-D-Phe-Arg-Trp-Pen)-NH₂;
(SEQ ID NO: 654)
Ac-D-Arg-c(hCys-Gln-D-Phe-Arg-Trp-Pen)-OH;
(SEQ ID NO: 655)
H-D-Arg-c(hCys-Gln-D-Phe-Arg-Trp-Pen)-OH;
(SEQ ID NO: 656)
Ac-Lys-c(hCys-Gln-D-Phe-Arg-Trp-Pen)-NH₂;
(SEQ ID NO: 657)
Ac-Lys-c(hCys-Gln-D-Phe-Arg-Trp-Pen)-OH;
(SEQ ID NO: 658)
H-Lys-c(hCys-Gln-D-Phe-Arg-Trp-Pen)-NH₂;
(SEQ ID NO: 659)
H-Lys-c(hCys-Gln-D-Phe-Arg-Trp-Pen)-OH;
(SEQ ID NO: 660)
Ac-D-Lys-c(hCys-Gln-D-Phe-Arg-Trp-Pen)-NH₂;
(SEQ ID NO: 661)
H-D-Lys-c(hCys-Gln-D-Phe-Arg-Trp-Pen)-NH₂;
(SEQ ID NO: 662)
Ac-D-Lys-c(hCys-Gln-D-Phe-Arg-Trp-Pen)-OH;
(SEQ ID NO: 663)
H-D-Lys-c(hCys-Gln-D-Phe-Arg-Trp-Pen)-OH;
(SEQ ID NO: 664)
Ac-Arg-c(hCys-Ser-D-Phe-Arg-Trp-Pen)-OH;
(SEQ ID NO: 665)
H-Arg-c(hCys-Ser-D-Phe-Arg-Trp-Pen)-NH₂;
(SEQ ID NO: 666)
H-Arg-c(hCys-Ser-D-Phe-Arg-Trp-Pen)-OH;
(SEQ ID NO: 667)
Ac-D-Arg-c(hCys-Ser-D-Phe-Arg-Trp-Pen)-NH₂;
(SEQ ID NO: 668)
H-D-Arg-c(hCys-Ser-D-Phe-Arg-Trp-Pen)-NH₂;
(SEQ ID NO: 669)
Ac-D-Arg-c(hCys-Ser-D-Phe-Arg-Trp-Pen)-OH;
(SEQ ID NO: 670)
H-D-Arg-c(hCys-Ser-D-Phe-Arg-Trp-Pen)-OH;
(SEQ ID NO: 671)
Ac-Lys-c(hCys-Ser-D-Phe-Arg-Trp-Pen)-NH₂;
(SEQ ID NO: 672)
Ac-Lys-c(hCys-Ser-D-Phe-Arg-Trp-Pen)-OH;
(SEQ ID NO: 673)
H-Lys-c(hCys-Ser-D-Phe-Arg-Trp-Pen)-NH₂;
(SEQ ID NO: 674)
H-Lys-c(hCys-Ser-D-Phe-Arg-Trp-Pen)-OH;
(SEQ ID NO: 675)
Ac-D-Lys-c(hCys-Ser-D-Phe-Arg-Trp-Pen)-NH₂;
(SEQ ID NO: 676)
H-D-Lys-c(hCys-Ser-D-Phe-Arg-Trp-Pen)-NH₂;
(SEQ ID NO: 677)
Ac-D-Lys-c(hCys-Ser-D-Phe-Arg-Trp-Pen)-OH;
(SEQ ID NO: 678)
H-D-Lys-c(hCys-Ser-D-Phe-Arg-Trp-Pen)-OH;
(SEQ ID NO: 679)
Ac-Arg-c(hCys-Thr-D-Phe-Arg-Trp-Pen)-OH;
(SEQ ID NO: 680)
H-Arg-c(hCys-Thr-D-Phe-Arg-Trp-Pen)-NH₂;
(SEQ ID NO: 681)
H-Arg-c(hCys-Thr-D-Phe-Arg-Trp-Pen)-OH;
(SEQ ID NO: 682)
Ac-D-Arg-c(hCys-Thr-D-Phe-Arg-Trp-Pen)-NH₂;
(SEQ ID NO: 683)
H-D-Arg-c(hCys-Thr-D-Phe-Arg-Trp-Pen)-NH₂;
(SEQ ID NO: 684)
Ac-D-Arg-c(hCys-Thr-D-Phe-Arg-Trp-Pen)-OH;
(SEQ ID NO: 685)
H-D-Arg-c(hCys-Thr-D-Phe-Arg-Trp-Pen)-OH;
(SEQ ID NO: 686)
Ac-Lys-c(hCys-Thr-D-Phe-Arg-Trp-Pen)-NH₂;
(SEQ ID NO: 687)
Ac-Lys-c(hCys-Thr-D-Phe-Arg-Trp-Pen)-OH;
(SEQ ID NO: 688)
H-Lys-c(hCys-Thr-D-Phe-Arg-Trp-Pen)-NH₂;
(SEQ ID NO: 689)
H-Lys-c(hCys-Thr-D-Phe-Arg-Trp-Pen)-OH;
(SEQ ID NO: 690)
Ac-D-Lys-c(hCys-Thr-D-Phe-Arg-Trp-Pen)-NH₂;
(SEQ ID NO: 691)
H-D-Lys-c(hCys-Thr-D-Phe-Arg-Trp-Pen)-NH₂;
(SEQ ID NO: 692)
Ac-D-Lys-c(hCys-Thr-D-Phe-Arg-Trp-Pen)-NH₂,
or
(SEQ ID NO: 693)
H-D-Lys-c(hCys-Thr-D-Phe-Arg-Trp-Pen)-NH₂.

[0599] In some embodiments, the MC4R agonist is a compound of Formula (XII-a):

[chemical structure]

[0600] or a pharmaceutically acceptable salt thereof, wherein:
[0601] Aaa and Bbb are selected from Cys, hCys, Pen capable of establishing a disulfide bridge; or
[0602] Glu, Asp, Lys, Orn, Dpr, Dbu capable of establishing a lactam bridge;
[0603] Xxx is Asn, Gln, Ser, Thr; and
[0604] Yyy is Lys, Arg, D-Lys, D-Arg.

[0605] In some embodiments, the compound of Formula (XII-a) is selected from:

(SEQ ID NO: 635)
H-Arg-c(hCys-Asn-D-Phe-Arg-Trp-Pen)-NH₂;
(SEQ ID NO: 643)
H-Lys-c(hCys-Asn-D-Phe-Arg-Trp-Pen)-NH₂;
(SEQ ID NO: 646)
H-D-Lys-c(hCys-Asn-D-Phe-Arg-Trp-Pen)-NH₂;
(SEQ ID NO: 650)
H-Arg-c(hCys-Gln-D-Phe-Arg-Trp-Pen)-NH₂;
(SEQ ID NO: 653)
H-D-Arg-c(hCys-Gln-D-Phe-Arg-Trp-Pen)-NH₂;
(SEQ ID NO: 658)
H-Lys-c(hCys-Gln-D-Phe-Arg-Trp-Pen)-NH₂;
(SEQ ID NO: 661)
H-D-Lys-c(hCys-Gln-D-Phe-Arg-Trp-Pen)-NH₂;
(SEQ ID NO: 665)
H-Arg-c(hCys-Ser-D-Phe-Arg-Trp-Pen)-NH₂;
(SEQ ID NO: 668)
H-D-Arg-c(hCys-Ser-D-Phe-Arg-Trp-Pen)-NH₂;
(SEQ ID NO: 673)
H-Lys-c(hCys-Ser-D-Phe-Arg-Trp-Pen)-NH₂;
(SEQ ID NO: 676)
H-D-Lys-c(hCys-Ser-D-Phe-Arg-Trp-Pen)-NH₂;
(SEQ ID NO: 680)
H-Arg-c(hCys-Thr-D-Phe-Arg-Trp-Pen)-NH₂;
(SEQ ID NO: 683)
H-D-Arg-c(hCys-Thr-D-Phe-Arg-Trp-Pen)-NH₂;
(SEQ ID NO: 688)
H-Lys-c(hCys-Thr-D-Phe-Arg-Trp-Pen)-NH₂;
(SEQ ID NO: 691)
H-D-Lys-c(hCys-Thr-D-Phe-Arg-Trp-Pen)-NH₂;
and
(SEQ ID NO: 693)
H-D-Lys-c(hCys-Thr-D-Phe-Arg-Trp-Pen)-NH₂.

[0606] In some embodiments, the MC4R agonist is a compound of Formula (XII-b):

[chemical structure]

[0607] or a pharmaceutically acceptable salt thereof, wherein:
[0608] Aaa and Bbb are selected from Cys, hCys, Pen capable of establishing a disulfide bridge; or
[0609] Glu, Asp, Lys, Orn, Dpr, Dbu capable of establishing a lactam bridge;
[0610] Xxx is Asn, Gln, Ser, Thr; and
[0611] Yyy is Lys, Arg, D-Lys, D-Arg.

[0612] In some embodiments, the compound of Formula (XII-b) is selected from:

(SEQ ID NO: 629)
Ac-Arg-c(hCys-Asn-D-Phe-Arg-Trp-Pen)-NH₂;
(SEQ ID NO: 630)
Ac-Arg-c(hCys-Gln-D-Phe-Arg-Trp-Pen)-NH₂;
(SEQ ID NO: 631)
Ac-Arg-c(hCys-Ser-D-Phe-Arg-Trp-Pen)-NH₂;
(SEQ ID NO: 632)
Ac-Arg-c(hCys-Thr-D-Phe-Arg-Trp-Pen)-NH₂;
(SEQ ID NO: 633)
Ac-Arg-c(Glu-Gln-D-Phe-Arg-Trp-Dpr)-NH₂;
(SEQ ID NO: 637)
Ac-D-Arg-c(hCys-Asn-D-Phe-Arg-Trp-Pen)-NH₂;
(SEQ ID NO: 641)
Ac-Lys-c(hCys-Asn-D-Phe-Arg-Trp-Pen)-NH₂;
(SEQ ID NO: 645)
Ac-D-Lys-c(hCys-Asn-D-Phe-Arg-Trp-Pen)-NH₂;
(SEQ ID NO: 652)
Ac-D-Arg-c(hCys-Gln-D-Phe-Arg-Trp-Pen)-NH₂;
(SEQ ID NO: 656)
Ac-Lys-c(hCys-Gln-D-Phe-Arg-Trp-Pen)-NH₂;
(SEQ ID NO: 660)
Ac-D-Lys-c(hCys-Gln-D-Phe-Arg-Trp-Pen)-NH₂;
(SEQ ID NO: 667)
Ac-D-Arg-c(hCys-Ser-D-Phe-Arg-Trp-Pen)-NH₂;
(SEQ ID NO: 671)
Ac-Lys-c(hCys-Ser-D-Phe-Arg-Trp-Pen)-NH₂;
(SEQ ID NO: 675)
Ac-D-Lys-c(hCys-Ser-D-Phe-Arg-Trp-Pen)-NH₂;
(SEQ ID NO: 682)
Ac-D-Arg-c(hCys-Thr-D-Phe-Arg-Trp-Pen)-NH₂;
(SEQ ID NO: 686)
Ac-Lys-c(hCys-Thr-D-Phe-Arg-Trp-Pen)-NH₂;
(SEQ ID NO: 690)
Ac-D-Lys-c(hCys-Thr-D-Phe-Arg-Trp-Pen)-NH₂;
and
(SEQ ID NO: 692)
Ac-D-Lys-c(hCys-Thr-D-Phe-Arg-Trp-Pen)-NH₂.

[0613] In some embodiments, the MC4R agonist is a compound of Formula (XII-c):

[chemical structure]

[0614] or a pharmaceutically acceptable salt thereof, wherein:
[0615] A₁ is H or Ac;
[0616] A₂ is OH or NH₂;
[0617] Yyy is L-Arg or D-Arg;
[0618] Aaa and Bbb are selected from Cys, hCys, and Pen capable of establishing a disulfide bridge; or
[0619] Glu, Asp, Lys, Orn, Dpr, and Dbu capable of establishing a lactam bridge; and
[0620] Xxx is Asn, Gln, Ser, or Thr.

[0621] In some embodiments, the compound of Formula (XII-c) is selected from:

(SEQ ID NO: 629)
Ac-Arg-c(hCys-Asn-D-Phe-Arg-Trp-Pen)-NH₂;
(SEQ ID NO: 630)
Ac-Arg-c(hCys-Gln-D-Phe-Arg-Trp-Pen)-NH₂;
(SEQ ID NO: 631)
Ac-Arg-c(hCys-Ser-D-Phe-Arg-Trp-Pen)-NH₂;
(SEQ ID NO: 632)
Ac-Arg-c(hCys-Thr-D-Phe-Arg-Trp-Pen)-NH₂;
(SEQ ID NO: 633)
Ac-Arg-c(Glu-Gln-D-Phe-Arg-Trp-Dpr)-NH₂;
(SEQ ID NO: 634)
Ac-Arg-c(hCys-Asn-D-Phe-Arg-Trp-Pen)-OH;
(SEQ ID NO: 635)
H-Arg-c(hCys-Asn-D-Phe-Arg-Trp-Pen)-NH₂;
(SEQ ID NO: 636)
H-Arg-c(hCys-Asn-D-Phe-Arg-Trp-Pen)-OH;
(SEQ ID NO: 637)
Ac-D-Arg-c(hCys-Asn-D-Phe-Arg-Trp-Pen)-NH₂;
(SEQ ID NO: 638)
H-D-Arg-c(hCys-Asn-D-Phe-Arg-Trp-Pen)-NH₂;
(SEQ ID NO: 639)
Ac-D-Arg-c(hCys-Asn-D-Phe-Arg-Trp-Pen)-OH;
(SEQ ID NO: 640)
H-D-Arg-c(hCys-Asn-D-Phe-Arg-Trp-Pen)-OH;
(SEQ ID NO: 649)
Ac-Arg-c(hCys-Gln-D-Phe-Arg-Trp-Pen)-OH;
(SEQ ID NO: 650)
H-Arg-c(hCys-Gln-D-Phe-Arg-Trp-Pen)-NH2,
(SEQ ID NO: 651)
H-Arg-c(hCys-Gln-D-Phe-Arg-Trp-Pen)-OH;
(SEQ ID NO: 652)
Ac-D-Arg-c(hCys-Gln-D-Phe-Arg-Trp-Pen)-NH₂;
(SEQ ID NO: 653)
H-D-Arg-c(hCys-Gln-D-Phe-Arg-Trp-Pen)-NH₂;
(SEQ ID NO: 654)
Ac-D-Arg-c(hCys-Gln-D-Phe-Arg-Trp-Pen)-OH;
(SEQ ID NO: 655)
H-D-Arg-c(hCys-Gln-D-Phe-Arg-Trp-Pen)-OH;
(SEQ ID NO: 664)
Ac-Arg-c(hCys-Ser-D-Phe-Arg-Trp-Pen)-OH;
(SEQ ID NO: 665)
H-Arg-c(hCys-Ser-D-Phe-Arg-Trp-Pen)-NH₂;
(SEQ ID NO: 666)
H-Arg-c(hCys-Ser-D-Phe-Arg-Trp-Pen)-OH;
(SEQ ID NO: 667)
Ac-D-Arg-c(hCys-Ser-D-Phe-Arg-Trp-Pen)-NH₂;
(SEQ ID NO: 668)
H-D-Arg-c(hCys-Ser-D-Phe-Arg-Trp-Pen)-NH₂;
(SEQ ID NO: 669)
Ac-D-Arg-c(hCys-Ser-D-Phe-Arg-Trp-Pen)-OH;
(SEQ ID NO: 670)
H-D-Arg-c(hCys-Ser-D-Phe-Arg-Trp-Pen)-OH;
(SEQ ID NO: 679)
Ac-Arg-c(hCys-Thr-D-Phe-Arg-Trp-Pen)-OH;
(SEQ ID NO: 680)
H-Arg-c(hCys-Thr-D-Phe-Arg-Trp-Pen)-NH₂;
(SEQ ID NO: 681)
H-Arg-c(hCys-Thr-D-Phe-Arg-Trp-Pen)-OH;
(SEQ ID NO: 682)
Ac-D-Arg-c(hCys-Thr-D-Phe-Arg-Trp-Pen)-NH₂;
(SEQ ID NO: 683)
H-D-Arg-c(hCys-Thr-D-Phe-Arg-Trp-Pen)-NH₂;
(SEQ ID NO: 684)
Ac-D-Arg-c(hCys-Thr-D-Phe-Arg-Trp-Pen)-OH;
and
(SEQ ID NO: 685)
H-D-Arg-c(hCys-Thr-D-Phe-Arg-Trp-Pen)-OH.

[0622] In some embodiments, the MC4R agonist is a compound of Formula (XII-d):

[chemical structure]

[0623] or a pharmaceutically acceptable salt thereof, wherein:
[0624] A₁ is Hor Ac;
[0625] A₂ is OH or NH₂;
[0626] Yyy is L-Lys or D-Lys;
[0627] Aaa and Bbb are selected from Cys, hCys, and Pen capable of establishing a disulfide bridge; or
[0628] Glu, Asp, Lys, Orn, Dpr, and Dbu capable of establishing a lactam bridge; and
[0629] Xxx is Asn, Gln, Ser, or Thr.

[0630] In some embodiments, the compound of Formula (XII-d) is selected from:

(SEQ ID NO: 641)
Ac-Lys-c(hCys-Asn-D-Phe-Arg-Trp-Pen)-NH₂;
(SEQ ID NO: 642)
Ac-Lys-c(hCys-Asn-D-Phe-Arg-Trp-Pen)-OH;
(SEQ ID NO: 643)
H-Lys-c(hCys-Asn-D-Phe-Arg-Trp-Pen)-NH₂;
(SEQ ID NO: 644)
H-Lys-c(hCys-Asn-D-Phe-Arg-Trp-Pen)-OH;
(SEQ ID NO: 645)
Ac-D-Lys-c(hCys-Asn-D-Phe-Arg-Trp-Pen)-NH₂;
(SEQ ID NO: 646)
H-D-Lys-c(hCys-Asn-D-Phe-Arg-Trp-Pen)-NH₂;
(SEQ ID NO: 647)
Ac-D-Lys-c(hCys-Asn-D-Phe-Arg-Trp-Pen)-OH;
(SEQ ID NO: 648)
H-D-Lys-c(hCys-Asn-D-Phe-Arg-Trp-Pen)-OH;
(SEQ ID NO: 656)
Ac-Lys-c(hCys-Gln-D-Phe-Arg-Trp-Pen)-NH₂;
(SEQ ID NO: 657)
Ac-Lys-c(hCys-Gln-D-Phe-Arg-Trp-Pen)-OH;
(SEQ ID NO: 658)
H-Lys-c(hCys-Gln-D-Phe-Arg-Trp-Pen)-NH₂;
(SEQ ID NO: 659)
H-Lys-c(hCys-Gln-D-Phe-Arg-Trp-Pen)-OH;
(SEQ ID NO: 660)
Ac-D-Lys-c(hCys-Gln-D-Phe-Arg-Trp-Pen)-NH₂;
(SEQ ID NO: 661)
H-D-Lys-c(hCys-Gln-D-Phe-Arg-Trp-Pen)-NH₂;
(SEQ ID NO: 662)
Ac-D-Lys-c(hCys-Gln-D-Phe-Arg-Trp-Pen)-OH;
(SEQ ID NO: 663)
H-D-Lys-c(hCys-Gln-D-Phe-Arg-Trp-Pen)-OH;
(SEQ ID NO: 671)
Ac-Lys-c(hCys-Ser-D-Phe-Arg-Trp-Pen)-NH₂;
(SEQ ID NO: 672)
Ac-Lys-c(hCys-Ser-D-Phe-Arg-Trp-Pen)-OH;
(SEQ ID NO: 673)
H-Lys-c(hCys-Ser-D-Phe-Arg-Trp-Pen)-NH₂;
(SEQ ID NO: 674)
H-Lys-c(hCys-Ser-D-Phe-Arg-Trp-Pen)-OH;
(SEQ ID NO: 675)
Ac-D-Lys-c(hCys-Ser-D-Phe-Arg-Trp-Pen)-NH₂;
(SEQ ID NO: 676)
H-D-Lys-c(hCys-Ser-D-Phe-Arg-Trp-Pen)-NH₂;
(SEQ ID NO: 677)
Ac-D-Lys-c(hCys-Ser-D-Phe-Arg-Trp-Pen)-OH;
(SEQ ID NO: 678)
H-D-Lys-c(hCys-Ser-D-Phe-Arg-Trp-Pen)-OH;
(SEQ ID NO: 686)
Ac-Lys-c(hCys-Thr-D-Phe-Arg-Trp-Pen)-NH₂;
(SEQ ID NO: 687)
Ac-Lys-c(hCys-Thr-D-Phe-Arg-Trp-Pen)-OH;
(SEQ ID NO: 688)
H-Lys-c(hCys-Thr-D-Phe-Arg-Trp-Pen)-NH₂;
(SEQ ID NO: 689)
H-Lys-c(hCys-Thr-D-Phe-Arg-Trp-Pen)-OH;
(SEQ ID NO: 690)
Ac-D-Lys-c(hCys-Thr-D-Phe-Arg-Trp-Pen)-NH₂;
(SEQ ID NO: 691)
H-D-Lys-c(hCys-Thr-D-Phe-Arg-Trp-Pen)-NH₂;
(SEQ ID NO: 692)
Ac-D-Lys-c(hCys-Thr-D-Phe-Arg-Trp-Pen)-NH₂,
and
(SEQ ID NO: 693)
H-D-Lys-c(hCys-Thr-D-Phe-Arg-Trp-Pen)-NH₂.

[0631] In some embodiments, the MC4R agonist is an agonist described in WO2014/144260 or WO2017/059075, each of which is incorporated herein by reference. Administration of a compound or pharmaceutically acceptable salt thereof or a composition comprising a compound or pharmaceutical salt of a compound of the disclosure useful to practice the methods described herein, can be continuous, hourly, four times daily, three time daily, twice daily, once daily, once every other day, twice weekly, once weekly, once every two weeks, once a month, or once every two months, or longer or some other intermittent dosing regimen.

[0632] Examples of administration of a compound or composition comprising a compound or pharmaceutical salt of a compound of the disclosure include peripheral administration. Examples of peripheral administration include oral, subcutaneous, intraperitoneal, intramuscular, intravenous, rectal, transdermal or intranasal forms of administration.

[0633] As used herein, peripheral administration can include all forms of administration of a compound or a composition comprising a compound of the instant disclosure which excludes intracranial administration. Examples of peripheral administration include, but are not limited to, oral, parenteral (e.g., intramuscular, intraperitoneal, intravenous or subcutaneous injection, extended release, slow release implant, depot and the like), nasal, vaginal, rectal, sublingual or topical routes of administration, including transdermal patch applications and the like.

[0634] The nomenclature used to define the peptides is that typically used in the art wherein the amino group at the N-terminus appears to the left and the carboxyl group at the C-terminus appears to the right. Where the amino acid has D and L isomeric forms, it is the L form of the amino acid that is represented unless otherwise explicitly indicated.

[0635] The compounds of the disclosure useful for practicing the methods described herein may possess one or more chiral centers and so exist in a number of stereoisomeric forms. All stereoisomers and mixtures thereof are included in the scope of the present disclosure. Racemic compounds may either be separated using preparative HPLC and a column with a chiral stationary phase or resolved to yield individual enantiomers utilizing methods known to those skilled in the art. In addition, chiral intermediate compounds may be resolved and used to prepare chiral compounds of the disclosure.

[0636] The compounds described herein may exist in one or more tautomeric forms. All tautomers and mixtures thereof are included in the scope of the present disclosure. For example, a claim to 2-hydroxypyridinyl would also cover its tautomeric form, α-pyridonyl.

[0637] The present disclosure further features providing an MC4R agonist in combination with an additional agent. Exemplary agents include a second MC4R agonist (e.g., an agent described herein or elsewhere), or an agent aimed to treat a symptom of obesity or a co-morbidity. For example, the additional agent may be an anti-hypertensive drug, a pain medication, an anti-inflammatory, a lipid-lowering agent, a cardiovascular drug, or a diuretic. The combination therapy may be administered as a single formulation or as separate formulations. In an embodiment, the MC4R agonist and the additional agent are administered as a single pharmaceutical composition. In an embodiment, the MC4R agonist and the additional agent are administered as separate pharmaceutical compositions. In the case of separate formulations, the MC4R agonist and the additional agent may be administered concomitantly or sequentially. In an embodiment, the MC4R agonist and the additional agent are administered concomitantly. In an embodiment, the MC4R agonist and the additional agent are administered sequentially. For example, the MC4R agonist may be administered prior to the additional agent or subsequent to the additional agent.

[0638] In some embodiments, the administration of the MC4R agonist and the additional agent has a synergistic or additive effect. For example, the administration of the MC4R agonist and the additional agent may have an additive effect, in which the therapeutic effect of the MC4R agonist and the additional agent is the total sum of the effects of each of the components individually. In contrast, the administration of the MC4R agonist and the additional agent may have a synergistic effect, in which the therapeutic effect of the MC4R agonist and the additional agent is greater than the sum of the individual components. The synergistic effect of the combination of the MC4R agonist and the additional agent may be 0.1%, 0.25%. 0.5%. 0.75%, 1%, 2%, 3%, 4%, 5%, 6%, 7%, 8%, 9%, 10%, 15%, 20%, 25%, 30%, 40%, 50%, 60%, 70%, 80%, 90%, 95%, or more than the total sum of the effects of the MC4R agonist and the additional agent administered individually. In an embodiment, the synergistic effect of the combination of the MC4R agonist and the additional agent is greater than between 5% and 75% of the total sum of the effects of the MC4R agonist and the additional agent administered individually.

[0639] Unless defined otherwise, all technical and scientific terms used herein have the same meaning as commonly understood by one of ordinary skill in the art to which this disclosure belongs. Also, all publications, patent applications, patents and other references mentioned herein are incorporated by reference in their entirety.

### Pharmaceutical Compositions/Administration

[0640] In accordance with any method or composition described herein, in embodiments, provided herein is a unit dosage of a MC4R agonist described herein, e.g., setmelanotide. In embodiments, the unit dosage contains 0.1-10 mg, e.g., 0.1, 0.2, 0.3, 0.4, 0.5, 0.6, 0.7, 0.8, 0.9, 1, 1.1, 1.2, 1.3, 1.4, 1.5, 1.6, 1.7, 1.8, 1.9, 2, 2.5, 3, 3.5, 4, 4.5, 5, 5.5, 6, 6.5, 7, 7.5, 8, 8.5, 9, 9.5, or 10 mg of the MC4R agonist. In embodiments, the unit dosage contains about 0.1, 0.2, 0.3, 0.4, 0.5, 0.6, 0.7, 0.8, 0.9, 1, 1.1, 1.2, 1.3, 1.4, 1.5, 1.6, 1.7, 1.8, 1.9, or 2 mg of the agonist. In embodiments, the unit dosage is suitable for injection, e.g., subcutaneous injection. In embodiments, the unit dosage is disposed in a delivery device suitable for injection, e.g., subcutaneous injection. In embodiments, the unit dosage is disposed in a syringe suitable for injection, e.g., subcutaneous injection, or a pen-type injector. Exemplary pen-type injectors are described, e.g., in U.S. Pat. Nos. 8,512,297B2, 5,688,251A, 5,820,602A, US2014/0163526A1, and U.S. Pat. No. 5,226,895A, incorporated herein by reference.

[0641] In embodiments, also provided herein is a pharmaceutical composition comprising a MC4R agonist described herein, e.g., setmelanotide. In embodiments, the pharmaceutical composition includes a therapeutically effective amount of a MC4R agonist described herein, e.g., setmelanotide. A therapeutically effective amount of the agonist can vary according to factors such as the disease state, age, sex, and weight of the individual, and the ability of the agonist to elicit a desired response in the individual, e.g., amelioration of at least one disorder parameter, e.g., a parameter of obesity or hyperphagia, or amelioration of at least one symptom of the disorder, e.g., obesity, hyperphagia, a disease or disorder associated with a gene in Table 2, or other obesity-associated genetic disorder. In embodiments, a therapeutically effective amount is also one in which any toxic or a detrimental effect of the composition is outweighed by the therapeutically beneficial effects.

[0642] In certain embodiments, the agonist may be prepared with a carrier that will protect it against rapid release, such as a controlled release formulation, including implants, and microencapsulated delivery systems. Biodegradable, biocompatible polymers can be used, such as ethylene vinyl acetate, polyanhydrides, polyglycolic acid, collagen, polyorthoesters, and polylactic acid. Many methods for the preparation of such formulations are patented or generally known. See, e.g., Sustained and Controlled Release Drug Delivery Systems, J. R. Robinson, ed., Marcel Dekker, Inc., New York, 1978.

[0643] In other embodiments, the MC4R agonist can be prepared as described in WO2014/144842, incorporated herein by reference. In embodiments, the MC4R agonist is prepared in a formulation comprising an anionic excipient, e.g., PEG-carboxylic acid, fatty acid having 10 or more carbon atoms, and/or anionic phospholipid. In embodiments, the anionic phospholipid is described in WO2014/144842 (e.g., at pages 7-9). In some embodiments, the anionic phospholipid is 1,2-distearoyl-sn-Glycero-3-Phosphoethanolamine (DSPE), optionally conjugated to polyethylene glycol (PEG), the structure of which is:

[chemical structure]

with the value of “n” varying with molecular weight. In embodiments, the fatty acid is described in WO2014/144842 (e.g., at page 9). In embodiments, the PEG-carboxylic acid is described in WO2014/144842 (e.g., at pages 9-11). In embodiments, the molar ratio of the agonist to the anionic excipient ranges from about 1:1 to about 1:10.

[0644] In embodiments, the MC4R agonist forms an ionic complex with the other components of the formulation, and e.g., provides a desirable pharmacokinetic profile for the agonist (e.g., extend duration of drug action and/or minimize adverse effects). In embodiments, the formulation is a sustained release formulation. In embodiments, the formulation provides reduced fluctuations in concentration of the agonist after administration.

[0645] In other embodiments, the MC4R agonist can be prepared as described in WO 2019/099735, incorporated herein by reference. In embodiments, the MC4R agonist is prepared in a formulation comprising a neutral diacyl lipid and/or a tocopherol; a phospholipid: an alcohol; and optionally, a polar solvent, e.g., a buffer, optionally comprising an antioxidant. In an embodiment, the neutral diacyl lipid comprises glycerol dioleate (GDO). In an embodiment, the amount of the neutral diacyl lipid (e.g., GDO) is between 20-80%, 30-70%, 33-60%, or 38-43% by weight, e.g., of the total formulation. In an embodiment, the phospholipid comprises phosphatidylcholine (e.g., soybean phosphatidylcholine). In an embodiment, the amount of the phospholipid (e.g., phosphatidylcholine (e.g., soybean phosphatidylcholine)) is between 20-80%, 30-70%, 33-60%, or 38-43% by weight, e.g., of the total formulation. In an embodiment, the alcohol comprises ethanol. In an embodiment, the amount by weight % of ethanol is greater than 1% by weight, e.g., between 1-20% by weight, e.g., of the total formulation. In an embodiment, the polar solvent, e.g., buffer, comprises citrate buffer, optionally wherein the pH of the buffer is 6.4. In an embodiment, the polar solvent, e.g., buffer, comprises citrate acid monohydrate. In an embodiment, the polar solvent, e.g., buffer, comprises an additional component, e.g., an antioxidant, or a chemical or physical stabilizing agent. In an embodiment, the antioxidant is EDTA.

[0646] A MC4R agonist described herein, e.g., setmelanotide, can be administered to a subject, e.g., human subject, by various methods. In some embodiments, pharmaceutical compositions may be specially formulated for administration in solid or liquid form, including those adapted for the following: oral administration, for example, drenches (aqueous or non-aqueous solutions or suspensions), tablets, e.g., those targeted for buccal, sublingual, and systemic absorption, boluses, powders, granules, pastes for application to the tongue; parenteral administration, for example, by subcutaneous, intramuscular, intravenous or epidural injection as, for example, a sterile solution or suspension, or sustained-release formulation; topical application, for example, as a cream, ointment, or a controlled-release patch or spray applied to the skin, lungs, or oral cavity; intravaginally or intrarectally, for example, as a pessary, cream, or foam; sublingually; ocularly; transdermally; or nasally, pulmonary, and/or to other mucosal surfaces. In embodiments, the route of administration is one of: intravenous injection or infusion, subcutaneous injection, or intramuscular injection. In embodiments, the route of administration is subcutaneous injection.

[0647] In embodiments, pharmaceutical compositions, e.g., comprising a MC4R agonist described herein, can be administered with medical devices. For example, compositions comprising the agonist can be administered with a needleless hypodermic injection device, such as the devices disclosed in U.S. Pat. Nos. 5,399,163, 5,383,851, 5,312,335, 5,064,413, 4,941,880, 4,790,824, or 4,596,556. Examples of implants and modules include: U.S. Pat. No. 4,487,603, which discloses an implantable micro-infusion pump for dispensing medication at a controlled rate; U.S. Pat. No. 4,486,194, which discloses a therapeutic device for administering medicaments through the skin; U.S. Pat. No. 4,447,233, which discloses a medication infusion pump for delivering medication at a precise infusion rate; U.S. Pat. No. 4,447,224, which discloses a variable flow implantable infusion apparatus for continuous drug delivery; U.S. Pat. No. 4,439,196, which discloses an osmotic drug delivery system having multi-chamber compartments; and U.S. Pat. No. 4,475,196, which discloses an osmotic drug delivery system. Other such implants, delivery systems, and modules can also be used.

[0648] In embodiments, continuous administration can be indicated, e.g., via subcutaneous pump. In embodiments, the agonist is administered via a syringe (e.g., prefilled syringe), an implantable device, a needleless hypodermic injection device, an infusion pump (e.g., implantable infusion pump), or an osmotic delivery system.

[0649] In embodiments, the agonist is administered at a unit dosage, e.g., comprising 0.1-10 mg, e.g., 0.1, 0.2, 0.3, 0.4, 0.5, 0.6, 0.7, 0.8, 0.9, 1, 1.1, 1.2, 1.3, 1.4, 1.5, 1.6, 1.7, 1.8, 1.9, 2, 2.5, 3, 3.5, 4, 4.5, 5, 5.5, 6, 6.5, 7, 7.5, 8, 8.5, 9, 9.5, or 10 mg of the agonist, e.g., subcutaneously.

[0650] In embodiments, the MC4R agonist is administered in a bolus at a dose of between 0.1-10 mg, e.g., 0.1, 0.2, 0.3, 0.4, 0.5, 0.6, 0.7, 0.8, 0.9, 1, 1.1, 1.2, 1.3, 1.4, 1.5, 1.6, 1.7, 1.8, 1.9, 2, 2.5, 3, 3.5, 4, 4.5, 5, 5.5, 6, 6.5, 7, 7.5, 8, 8.5, 9, 9.5, or 10 mg of the MC4R agonist, e.g., subcutaneously.

[0651] In embodiments, the MC4R agonist is administered continuously, e.g., via a pump, e.g., subcutaneous pump.

[0652] In embodiments, the MC4R agonist, e.g., a unit dosage of the MC4R agonist, is disposed within a delivery device, e.g., a syringe (e.g., prefilled syringe), an implantable device, a needleless hypodermic injection device, an infusion pump (e.g., implantable infusion pump), or an osmotic delivery system.

[0653] In embodiments, a daily dosage of the MC4R agonist is administered, e.g., subcutaneously, to a subject. In embodiments, the daily dosage of the MC4R agonist is about 0.1 mg to about 10 mg, e.g., 0.1-0.2, 0.2-0.4, 0.4-0.6, 0.6-0.8, 0.8-1, 1-1.2, 1.2-1.5, 1.5-2, 2-2.5, 2.5-3, 3-3.5, 3.5-4, 4-4.5, 4.5-5, 5-5.5, 5.5-6, 6-6.5, 6.5-7, 7-7.5, 7.5-8, 8-8.5, 8.5-9, 9-9.5, 9.5-10 mg, e.g., administered subcutaneously.

[0654] In embodiments, the MC4R agonist, e.g., setmelanotide, is administered, e.g., via one or multiple administrations, over a period of at least 3 weeks, e.g., at least 3, 4, 5, 6, 7, 8, 9, 10, 11, 12, 13, 14, 15, 16, 17, 18, 19, 20, 21, 22, 23, 24, 25, 26, 27, 28, 29, 30, 31, 32, 33, 34, 35, 36, 37, 38, 39, or 40 weeks or more, or at least 1, 2, 3, 4, 5, 6, 7, 8, 8, 9, 10, 11, or 12 months or more, or at least 1, 2, 3, 4 years or more. In embodiments, where multiple administrations are provided of the MC4R agonist, the time interval in between any two of the administrations is at least 6 hours, e.g., 6 h, 12 h, 24 h, 1 day, 2 days, 3 days, 4 days, 5 days, 6 days, 7 days, 1 week, 2 weeks, 3 weeks, 4 weeks, or more. In embodiments, the interval in between any two of the administrations is 1 day.

### Kits

[0655] A MC4R agonist described herein, e.g., setmelanotide, can be provided in a kit. The kit may include a MC4R agonist described herein and, optionally, a container, a pharmaceutically acceptable carrier and/or informational material. The informational material can be descriptive, instructional, marketing or other material that relates to the methods described herein and/or the use of the MC4R agonist for the methods described herein.

[0656] The informational material of the kits is not limited in its form. In one embodiment, the informational material can include information about production of the MC4R agonist, physical properties of the MC4R agonist, concentration, date of expiration, batch or production site information, and so forth. In one embodiment, the informational material relates to methods for administering the MC4R agonist, e.g., by a route of administration described herein and/or at a dose and/or dosing schedule described herein.

[0657] In one embodiment, the informational material can include instructions to administer an MC4R agonist described herein in a suitable manner to perform the methods described herein, e.g., in a suitable dose, dosage form, or mode of administration (e.g., a dose, dosage form, or mode of administration described herein). In another embodiment, the informational material can include instructions to administer an MC4R agonist to a suitable subject, e.g., a human, e.g., an obese human, e.g., severely obese human, e.g., having a disease or disorder associated with a gene in Table 2.

[0658] The informational material of the kits is not limited in its form. In many cases, the informational material, e.g., instructions, is provided in printed matter, e.g., a printed text, drawing, and/or photograph, e.g., a label or printed sheet. However, the informational material can also be provided in other formats, such as Braille, computer readable material, video recording, or audio recording. In another embodiment, the informational material of the kit is contact information, e.g., a physical address, email address, website, or telephone number, where a user of the kit can obtain substantive information about an MC4R agonist described herein and/or its use in the methods described herein. The informational material can also be provided in any combination of formats.

[0659] In addition to an MC4R agonist, the composition of the kit can include other ingredients, such as a surfactant, a lyo-protectant or stabilizer, an antioxidant, an antibacterial agent, a bulking agent, a chelating agent, an inert gas, a tonicity agent and/or a viscosity agent, a solvent or buffer, a stabilizer, a preservative, a pharmaceutically acceptable carrier and/or a second agent for treating a condition or disorder described herein. Alternatively, the other ingredients can be included in the kit, but in different compositions or containers than an MC4R agonist described herein.

[0660] In some embodiments, a component of the kit is stored in a sealed vial, e.g., with a rubber or silicone closure (e.g., a polybutadiene or polyisoprene closure). In some embodiments, a component of the kit is stored under inert conditions (e.g., under Nitrogen or another inert gas such as Argon). In some embodiments, a component of the kit is stored under anhydrous conditions (e.g., with a desiccant). In some embodiments, a component of the kit is stored in a light blocking container such as an amber vial.

[0661] An MC4R agonist described herein can be provided in any form, e.g., liquid, frozen, dried or lyophilized form. It is preferred that a composition including the MC4R agonist described herein be substantially pure and/or sterile. When an MC4R agonist described herein such as setmelanotide is provided in a liquid solution, the liquid solution preferably is an aqueous solution, with a sterile aqueous solution being preferred. In one embodiment, the MC4R agonist is supplied with a diluents or instructions for dilution. The diluent can include for example, a salt or saline solution, e.g., a sodium chloride solution having a pH between 6 and 9, lactated Ringer's injection solution, D5W, or PLASMA-LYTE A Injection pH 7.4® (Baxter, Deerfield, IL).

[0662] The kit can include one or more containers for the composition containing an MC4R agonist described herein. In some embodiments, the kit contains separate containers, dividers or compartments for the composition and informational material. For example, the composition can be contained in a bottle, vial, IV admixture bag, IV infusion set, piggyback set or syringe (e.g., prefilled syringe), and the informational material can be contained in a plastic sleeve or packet. In other embodiments, the separate elements of the kit are contained within a single, undivided container. For example, the composition is contained in a bottle, vial or syringe that has attached thereto the informational material in the form of a label. In embodiments, the composition is contained in an injector device, e.g., a pen-type injector. The containers of the kits can be airtight or waterproof (e.g., impermeable to changes in moisture or evaporation).

### EXEMPLARY ENUMERATED EMBODIMENTS

[0663] 1. A method of treating a non-genetic obesity in a subject comprising administering to the subject a melanocortin-4 receptor (MC4R) agonist, wherein the subject:
[0664] (i) has or is identified as having a non-genetic obesity;
[0665] (ii) has or is identifying as having damage to the brain tissue; and/or
[0666] (iii) has or is identified as having a proliferative brain disease, thereby treating the non-genetic obesity in the subject.

[0667] 2. The method of embodiment 1, comprising (i).

[0668] 3. The method of any one of the preceding embodiments, comprising (ii).

[0669] 4. The method of any one of the preceding embodiments, comprising (iii).

[0670] 5. The method of any one of the preceding embodiments, wherein the non-genetic obesity comprises obesity is caused by a neurodevelopmental abnormality or a brain malformation.

[0671] 6. The method of any one of the preceding embodiments, wherein the damage to the brain tissue is present in the hypothalamus.

[0672] 7. The method of embodiment 6, wherein the damage to the brain tissue is present in the paraventricular hypothalamic nucleus, ventromedial hypothalamic nucleus, or arcuate hypothalamic nucleus.

[0673] 8. The method of embodiment 7, wherein the damage or trauma in the brain occurs in the ventromedial nucleus.

[0674] 9. The method of any one of the preceding embodiments, wherein the non-genetic obesity comprises hypothalamic obesity.

[0675] 10. The method of any one of the preceding embodiments, wherein the proliferative brain disease comprises a benign tumor, a benign lesion, or a malignant tumor (e.g., cancer).

[0676] 11. The method of embodiment 10, wherein the proliferative brain disease is present in the hypothalamus.

[0677] 12. The method of any one of embodiments 10 or 11, wherein the proliferative brain disease is present in the paraventricular hypothalamic nucleus, ventromedial hypothalamic nucleus, or arcuate hypothalamic nucleus.

[0678] 13. The method of any one of embodiments 10-12, wherein the proliferative brain disease comprises craniopharyngioma or astrocytoma.

[0679] 14. The method of any one of the preceding embodiments, wherein the subject has undergone a surgery (e.g., tumor removal or bariatric surgery) or received radiation.

[0680] 15. The method of any one of the preceding embodiments, wherein the subject is obese, e.g., severely obese.

[0681] 16. The method of any one of the preceding embodiments, wherein the subject is hyperphagic.

[0682] 17. The method of any one of the preceding embodiments, wherein the subject has a body mass index (BMI) greater than 35 kg/m² (e.g., ≥36, 37, 38, 39, 40, 41, 42, 43, 44, 45, 46, 47, 48, 49, 50 kg/m² or greater) prior to administration of the MC4R agonist, e.g., at the time the MC4R agonist is prescribed, or at the time of the first administration.

[0683] 18. The method of any one of the preceding embodiments wherein the subject has a body mass index (BMI) greater than 40 kg/m² (e.g., ≥41, 42, 43, 44, 45, 46, 47, 48, 49, 50, 51, 52, 53, 54, 55 kg/m² or greater) prior to administration of the MC4R agonist, e.g., at the time the MC4R agonist is prescribed, or at the time of the first administration.

[0684] 19. The method of any one of the preceding embodiments, wherein the subject has failed one or more previous therapies, e.g., exercise, diet, or behavioral therapies, prior to administration of the MC4R agonist, e.g., at the time the MC4R agonist is prescribed, or at the time of the first administration.

[0685] 20. The method of any one of the preceding embodiments, wherein the subject has a lower body weight after administration of the MC4R agonist than before administration of the MC4R agonist.

[0686] 21. The method of any one of the preceding embodiments, wherein the MC4R agonist is has the structure of Formula (I):

[chemical structure]

[0687] wherein:
[0688] A¹ is Acc, HN—(CH₂)ₘ—C(O), L- or D-amino acid, or deleted;
[0689] A² is Cys, D-Cys, hCys, D-hCys, Pen, D-Pen, Asp, or Glu;
[0690] A³ is Gly, Ala, β-Ala, Gaba, Aib, D-amino acid, or deleted;
[0691] A⁴ is His, 2-Pal, 3-Pal, 4-Pal, Taz, 2-Thi, 3-Thi, or (X¹, X², X³, X⁴, X⁵)Phe;
[0692] A⁵ is D-Phe, Phe, D-1-Nal, D-2-Nal, D-Trp, D-Bal, D-(X¹, X², X³, X⁴, X⁵)Phe, or D-(Et)Tyr;
[0693] A⁶ is Arg, hArg, Dab, Dap, Lys, Orn, or HN—CH((CH₂)ₙ—N(R⁴R⁵))—C(O);
[0694] A⁷ is Trp, 1-Nal, 2-Nal, Bal, Bip, D-Trp, D-2-Nal, D-Bal or D-Bip;
[0695] A⁸ is Gly, D-Ala, Acc, Ala, β-Ala, Gaba, Apn, Ahx, Aha, HN—(CH₂)ₛ—C(O), or deleted;
[0696] A⁹ is Cys, D-Cys, hCys, D-hCys, Pen, D-Pen, Dab, Dap, Orn, or Lys;
[0697] A¹⁰ is Acc, HN—(CH₂)ᵣ—C(O), L- or D-amino acid, or deleted;
[0698] R¹ is OH or NH₂;
[0699] each of R² and R³ is, independently for each occurrence, selected from the group consisting of H, (C₁-C₃₀)alkyl, (C₁-C₃₀)heteroalkyl, (C₁-C₃₀)acyl, (C₂-C₃₀)alkenyl, (C₂-C₃₀)alkynyl, aryl(C₁-C₃₀)alkyl, aryl(C₁-C₃₀)acyl, substituted (C₁-C₃₀)alkyl, substituted (C₁-C₃₀)heteroalkyl, substituted (C₁-C₃₀)acyl, substituted (C₂-C₃₀)alkenyl, substituted (C₂-C₃₀)alkynyl, substituted aryl(C₁-C₃₀)alkyl, and substituted aryl(C₁-C₃₀)acyl;
[0700] each of R⁴ and R⁵ is, independently for each occurrence, H, (C₁-C₄₀)alkyl, (C₁-C₄₀)heteroalkyl, (C₁-C₄₀)acyl, (C₂-C₄₀)alkenyl, (C₂-C₄₀)alkynyl, aryl(C₁-C₄₀)alkyl, aryl(C₁-C₄₀)acyl, substituted (C₁-C₄₀)alkyl, substituted (C₁-C₄₀)heteroalkyl, substituted (C₁-C₄₀)acyl, substituted (C₂-C₄₀)alkenyl, substituted (C₂-C₄₀)alkynyl, substituted aryl(C₁-C₄₀)alkyl, substituted aryl(C₁-C₄₀)acyl, (C₁-C₄₀)alkylsulfonyl, or —C(NH)—NH₂;
[0701] m is, independently for each occurrence, 1, 2, 3, 4, 5, 6 or 7;
[0702] n is, independently for each occurrence, 1, 2, 3, 4 or 5;
[0703] s is, independently for each occurrence, 1, 2, 3, 4, 5, 6, or 7;
[0704] t is, independently for each occurrence, 1, 2, 3, 4, 5, 6, or 7;
[0705] X¹, X², X³, X⁴, and X⁵ each is, independently for each occurrence, H, F, Cl, Br, I, (C₁-C₁₀)alkyl, substituted (C₁-C₁₀)alkyl, (C₂-C₁₀)alkenyl, substituted (C₂-C₁₀)alkenyl, (C₂-C₁₀)alkynyl, substituted (C₂-C₁₀)alkynyl, aryl, substituted aryl, OH, NH₂, NO₂, or CN.

[0706] 22. The method of embodiment 21, wherein A¹ is selected from Lys, D-Lys, Arg, and D-Arg.

[0707] 23. The method of embodiment 21, wherein A² and A⁹ are each independently selected from Cys, hCys, and Pen.

[0708] 24. The method of embodiment 21, wherein A³ is selected from Ala or D-Ala.

[0709] 25. The method of embodiment 21, wherein A⁴ is selected from His and D-His.

[0710] 26. The method of embodiment 21, wherein A⁵ is selected from Phe, D-Phe, D-1-Nal, and D-2-Nal.

[0711] 27. The method of embodiment 21, wherein A⁶ is Arg.

[0712] 28. The method of embodiment 21, wherein A⁷ is Trp.

[0713] 29. The method of embodiment 21, wherein A⁸ and/or A¹⁰ is deleted.

[0714] 30. The method of embodiment 21, wherein R¹ is NH₂.

[0715] 31. The method of embodiment 21, wherein one of R² and R³ is independently hydrogen and the other of R² and R³ is independently (C₁-C₃₀) acyl (e.g., acetyl).

[0716] 32. The method of any one of the preceding embodiments, wherein the MC4R agonist is Ac-Arg-c(Cys-D-Ala-His-D-Phe-Arg-Trp-Cys)-NH₂ (SEQ ID NO: 140).

[0717] 33. The method of any one of the preceding embodiments, wherein the MC4R agonist has the structure of Formula (II) or a pharmaceutically acceptable salt thereof:

[chemical structure]

[0718] where Xxx is Asn, Gln, Ser, or Thr,
[0719] where A₁ is H or Ac,
[0720] where A₂ is OH or NH₂, and
[0721] where Yyy is Lys, Arg, D-Lys, or D-Arg.

[0722] 34. The method of embodiment 33, wherein the MC4R agonist is selected from:

SEQ ID NO: 629)
Ac-Arg-c(hCys-Asn-D-Phe-Arg-Trp-Pen)-NH₂;
(SEQ ID NO: 630)
Ac-Arg-c(hCys-Gln-D-Phe-Arg-Trp-Pen)-NH₂;
(SEQ ID NO: 631)
Ac-Arg-c(hCys-Ser-D-Phe-Arg-Trp-Pen)-NH₂;
(SEQ ID NO: 632)
Ac-Arg-c(hCys-Thr-D-Phe-Arg-Trp-Pen)-NH₂;
(SEQ ID NO: 633)
Ac-Arg-c(Glu-Gln-D-Phe-Arg-Trp-Dpr)-NH₂;
(SEQ ID NO: 634)
Ac-Arg-c(hCys-Asn-D-Phe-Arg-Trp-Pen)-OH;
(SEQ ID NO: 635)
H-Arg-c(hCys-Asn-D-Phe-Arg-Trp-Pen)-NH₂;
(SEQ ID NO: 636)
H-Arg-c(hCys-Asn-D-Phe-Arg-Trp-Pen)-OH;
(SEQ ID NO: 637)
Ac-D-Arg-c(hCys-Asn-D-Phe-Arg-Trp-Pen)-NH₂;
(SEQ ID NO: 638)
H-D-Arg-c(hCys-Asn-D-Phe-Arg-Trp-Pen)-NH₂;
(SEQ ID NO: 639)
Ac-D-Arg-c(hCys-Asn-D-Phe-Arg-Trp-Pen)-OH;
(SEQ ID NO: 640)
H-D-Arg-c(hCys-Asn-D-Phe-Arg-Trp-Pen)-OH;
(SEQ ID NO: 641)
Ac-Lys-c(hCys-Asn-D-Phe-Arg-Trp-Pen)-NH₂;
(SEQ ID NO: 642)
Ac-Lys-c(hCys-Asn-D-Phe-Arg-Trp-Pen)-OH;
(SEQ ID NO: 643)
H-Lys-c(hCys-Asn-D-Phe-Arg-Trp-Pen)-NH₂;
(SEQ ID NO: 644)
H-Lys-c(hCys-Asn-D-Phe-Arg-Trp-Pen)-OH;
(SEQ ID NO: 645)
Ac-D-Lys-c(hCys-Asn-D-Phe-Arg-Trp-Pen)-NH₂;
(SEQ ID NO: 646)
H-D-Lys-c(hCys-Asn-D-Phe-Arg-Trp-Pen)-NH₂;
(SEQ ID NO: 647)
Ac-D-Lys-c(hCys-Asn-D-Phe-Arg-Trp-Pen)-OH;
(SEQ ID NO: 648)
H-D-Lys-c(hCys-Asn-D-Phe-Arg-Trp-Pen)-OH;
(SEQ ID NO: 649)
Ac-Arg-c(hCys-Gln-D-Phe-Arg-Trp-Pen)-OH;
(SEQ ID NO: 650)
H-Arg-c(hCys-Gln-D-Phe-Arg-Trp-Pen)-NH₂;
(SEQ ID NO: 651)
H-Arg-c(hCys-Gln-D-Phe-Arg-Trp-Pen)-OH;
(SEQ ID NO: 652)
Ac-D-Arg-c(hCys-Gln-D-Phe-Arg-Trp-Pen)-NH₂;
(SEQ ID NO: 653)
H-D-Arg-c(hCys-Gln-D-Phe-Arg-Trp-Pen)-NH₂;
(SEQ ID NO: 654)
Ac-D-Arg-c(hCys-Gln-D-Phe-Arg-Trp-Pen)-OH;
(SEQ ID NO: 655)
H-D-Arg-c(hCys-Gln-D-Phe-Arg-Trp-Pen)-OH;
(SEQ ID NO: 656)
Ac-Lys-c(hCys-Gln-D-Phe-Arg-Trp-Pen)-NH₂;
(SEQ ID NO: 657)
Ac-Lys-c(hCys-Gln-D-Phe-Arg-Trp-Pen)-OH;
(SEQ ID NO: 658)
H-Lys-c(hCys-Gln-D-Phe-Arg-Trp-Pen)-NH₂;
(SEQ ID NO: 659)
H-Lys-c(hCys-Gln-D-Phe-Arg-Trp-Pen)-OH;
(SEQ ID NO: 660)
Ac-D-Lys-c(hCys-Gln-D-Phe-Arg-Trp-Pen)-NH₂;
(SEQ ID NO: 661)
H-D-Lys-c(hCys-Gln-D-Phe-Arg-Trp-Pen)-NH₂;
(SEQ ID NO: 662)
Ac-D-Lys-c(hCys-Gln-D-Phe-Arg-Trp-Pen)-OH;
(SEQ ID NO: 663)
H-D-Lys-c(hCys-Gln-D-Phe-Arg-Trp-Pen)-OH;
(SEQ ID NO: 664)
Ac-Arg-c(hCys-Ser-D-Phe-Arg-Trp-Pen)-OH;
(SEQ ID NO: 665)
H-Arg-c(hCys-Ser-D-Phe-Arg-Trp-Pen)-NH₂;
(SEQ ID NO: 666)
H-Arg-c(hCys-Ser-D-Phe-Arg-Trp-Pen)-OH;
(SEQ ID NO: 667)
Ac-D-Arg-c(hCys-Ser-D-Phe-Arg-Trp-Pen)-NH₂;
(SEQ ID NO: 668)
H-D-Arg-c(hCys-Ser-D-Phe-Arg-Trp-Pen)-NH₂;
(SEQ ID NO: 669)
Ac-D-Arg-c(hCys-Ser-D-Phe-Arg-Trp-Pen)-OH;
(SEQ ID NO: 670)
H-D-Arg-c(hCys-Ser-D-Phe-Arg-Trp-Pen)-OH;
(SEQ ID NO: 671)
Ac-Lys-c(hCys-Ser-D-Phe-Arg-Trp-Pen)-NH₂;
(SEQ ID NO: 672)
Ac-Lys-c(hCys-Ser-D-Phe-Arg-Trp-Pen)-OH;
(SEQ ID NO: 673)
H-Lys-c(hCys-Ser-D-Phe-Arg-Trp-Pen)-NH₂;
(SEQ ID NO: 674)
H-Lys-c(hCys-Ser-D-Phe-Arg-Trp-Pen)-OH;
(SEQ ID NO: 675)
Ac-D-Lys-c(hCys-Ser-D-Phe-Arg-Trp-Pen)-NH₂;
(SEQ ID NO: 676)
H-D-Lys-c(hCys-Ser-D-Phe-Arg-Trp-Pen)-NH₂;
(SEQ ID NO: 677)
Ac-D-Lys-c(hCys-Ser-D-Phe-Arg-Trp-Pen)-OH;
(SEQ ID NO: 678)
H-D-Lys-c(hCys-Ser-D-Phe-Arg-Trp-Pen)-OH;
(SEQ ID NO: 679)
Ac-Arg-c(hCys-Thr-D-Phe-Arg-Trp-Pen)-OH;
(SEQ ID NO: 680)
H-Arg-c(hCys-Thr-D-Phe-Arg-Trp-Pen)-NH₂;
(SEQ ID NO: 681)
H-Arg-c(hCys-Thr-D-Phe-Arg-Trp-Pen)-OH;
(SEQ ID NO: 682)
Ac-D-Arg-c(hCys-Thr-D-Phe-Arg-Trp-Pen)-NH₂;
(SEQ ID NO: 683)
H-D-Arg-c(hCys-Thr-D-Phe-Arg-Trp-Pen)-NH₂;
(SEQ ID NO: 684)
Ac-D-Arg-c(hCys-Thr-D-Phe-Arg-Trp-Pen)-OH;
(SEQ ID NO: 685)
H-D-Arg-c(hCys-Thr-D-Phe-Arg-Trp-Pen)-OH;
(SEQ ID NO: 686)
Ac-Lys-c(hCys-Thr-D-Phe-Arg-Trp-Pen)-NH₂;
(SEQ ID NO: 687)
Ac-Lys-c(hCys-Thr-D-Phe-Arg-Trp-Pen)-OH;
(SEQ ID NO: 688)
H-Lys-c(hCys-Thr-D-Phe-Arg-Trp-Pen)-NH₂;
(SEQ ID NO: 689)
H-Lys-c(hCys-Thr-D-Phe-Arg-Trp-Pen)-OH;
(SEQ ID NO: 690)
Ac-D-Lys-c(hCys-Thr-D-Phe-Arg-Trp-Pen)-NH₂;
(SEQ ID NO: 691)
H-D-Lys-c(hCys-Thr-D-Phe-Arg-Trp-Pen)-NH₂;
(SEQ ID NO: 692)
Ac-D-Lys-c(hCys-Thr-D-Phe-Arg-Trp-Pen)-NH₂;
and
(SEQ ID NO: 693)
H-D-Lys-c(hCys-Thr-D-Phe-Arg-Trp-Pen)-NH₂,

or a pharmaceutically acceptable salt thereof.

[0723] 35. The method of any one of the preceding embodiments, wherein the MC4R agonist is formulated as a pharmaceutical composition.

[0724] 36. The method of embodiment 35, wherein the pharmaceutical composition further comprises a pharmaceutically acceptable excipient.

[0725] 37. The method of embodiment 35, wherein the pharmaceutical composition comprises a 25 polyethylene glycol (e.g., a modified polyethylene glycol, e.g., mPEG-DSPE, e.g., mPEG-2,000-DSPE).

[0726] 38. The method of any one of the preceding embodiments, comprising administering the MC4R agonist in a unit dosage suitable for injection, e.g., subcutaneous injection, to the subject.

[0727] 39. The method of embodiment 38, wherein the unit dosage form is disposed within a delivery device, e.g., a syringe (e.g., prefilled syringe), an implantable device, a needleless hypodermic injection device, an infusion pump (e.g., implantable infusion pump), or an osmotic delivery system.

[0728] 40. The method of embodiment 39, wherein the MC4R agonist is administered subcutaneously, e.g., by subcutaneous injection.

[0729] 41. The method of any one of the preceding embodiments, wherein the subject is a human.

[0730] 42. The method of any one of the preceding embodiments, wherein the subject is an adult (e.g., over the age of 18 years old).

[0731] 43. The method of any one of the preceding embodiments, wherein the subject is a pediatric subject, e.g., a child (e.g., under the age of 18, 16, 14, 12, 10, 8, 6, or 4 years).

[0732] 44. The method of any one of the preceding embodiments, wherein prior to administration of the MC4R agonist, the subject has previously received treatment for obesity, e.g., a non-genetic obesity, e.g., hypothalamic obesity.

[0733] 45. The method of any one of the preceding embodiments, wherein after a first administration of the MC4R agonist (e.g., at least 2 weeks, 4 weeks, 6 weeks, 8 weeks, 10 weeks, 12 weeks, 4 months, 5 months, 6 months, 8 months, 10 months, 1 year, or longer), the subject exhibits a reduction in BMI.

[0734] 46. The method of embodiment 45, wherein the reduction of BMI in the subject is greater than 0.5%, 1%, 1.5%, 2%, 2.5%, 3%, 3.5%, 4%, 4.5%, 5%, 6%, 7%, 8%, 9%, 10%, 12%, 14% 16%, 18%, 20%, or more, e.g., relative to a reference standard (e.g., BMI prior to administration of the MC4R agonist).

[0735] 47. The method of any one of embodiments 45-46, wherein the reduction of BMI in the subject is greater than 0.5%, e.g., relative to a reference standard (e.g., BMI prior to administration of the MC4R agonist).

[0736] 48. The method of any one of embodiments 45-47, wherein the reduction of BMI in the subject is greater than 5%, e.g., relative to a reference standard (e.g., BMI prior to administration of the MC4R agonist).

[0737] 49. The method of any one of embodiments 45-47, wherein the reduction of BMI in the subject is greater than 10%, e.g., relative to a reference standard (e.g., BMI prior to administration of the MC4R agonist).

[0738] 50. The method of any one of embodiments 45-46, wherein the reduction of BMI in the subject is between 1%-10% (e.g., 1-5%, or 5-10%), e.g., relative to a reference standard (e.g., BMI prior to administration of the MC4R agonist).

[0739] 51. The method of any one of embodiments 45-50, wherein the reduction of BMI in the subject occurs between 8 weeks and 6 months after administration of the MC4R agonist.

[0740] 52. The method of any one of the preceding embodiments, wherein the subject is administered an additional agent (e.g., an additional therapeutic agent).

[0741] 53. The method of any of the preceding embodiments, wherein the MC4R agonist is a compound of Formula (I-a):

[chemical structure]

[0742] or a pharmaceutically acceptable salt thereof, wherein:
[0743] A¹ is Phe, D-Phe, or Nle;
[0744] A² is Cys;
[0745] A³ is deleted;
[0746] A⁴ is His;
[0747] A⁵ is D-Phe or D-(Et)Tyr;
[0748] A⁶ is Arg or hArg;
[0749] A⁷ is Trp or Bip;
[0750] A⁸ is Ala, R-Ala, Gaba, or Apn;
[0751] A⁹ is D-Cys; and
[0752] A¹⁰ is Thr or deleted.

[0753] 54. The method of embodiment 53, wherein the MC4R agonist of Formula (I-a) is selected from:

(SEQ ID NO: 4)
D-Phe-c(Cys-His-D-Phe-Arg-Trp-Ala-D-Cys)-Thr-NH₂;
(SEQ ID NO: 5)
D-Phe-c(Cys-His-D-Phe-Arg-Trp-β-Ala-D-Cys)-Thr-
NH₂;
(SEQ ID NO: 6)
D-Phe-c(Cys-His-D-Phe-Arg-Trp-Gaba-D-Cys)-Thr-NH₂;
(SEQ ID NO: 79)
D-Phe-c(Cys-His-D-Phe-hArg-Trp-β-Ala-D-Cys)-Thr-
NH₂;
(SEQ ID NO: 80)
D-Phe-c(Cys-His-D-(Et)Tyr-Arg-Trp-β-Ala-D-Cys)-
Thr-NH₂;
(SEQ ID NO: 81)
D-Phe-c(Cys-His-D-Phe-Arg-Bip-β-Ala-D-Cys)-Thr-
NH₂;
(SEQ ID NO: 82)
D-Phe-c(Cys-His-D-(Et)Tyr-hArg-Trp-β-Ala-D-Cys)-
Thr-NH₂;
(SEQ ID NO: 83)
D-Phe-c(Cys-His-D-Phe-hArg-Bip-β-Ala-D-Cys)-Thr-
NH₂;
(SEQ ID NO: 84)
D-Phe-c(Cys-His-D-(Et)Tyr-hArg-Bip-β-Ala-D-Cys)-
Thr-NH₂;
(SEQ ID NO: 85)
Nle-c(Cys-His-D-Phe-Arg-Trp-Apn-Cys)-NH₂;
and
(SEQ ID NO: 105)
Phe-c(Cys-His-D-Phe-Arg-Trp-Gaba-Cys)-NH₂.

[0754] 55. The method of any of the preceding embodiments, wherein the MC4R agonist is a compound of Formula (I-b):

[chemical structure]

or a pharmaceutically acceptable salt thereof, wherein:
[0755] A¹ is Nle, A6c, D-2-Nal, Cha, Oic, Chg, hCha, D-Cha, D-hCha, Nip, hPro, hLeu, Phe, D-Phe, D-Chg, hPhe, β-hMet, Gaba, Leu, Ile, Val, 2-Nal, Arg or D-Arg;
[0756] A² is Asp, Cys, D-Cys, or Pen;
[0757] A³ is D-Ala, -Ala, Gaba, Aib, Gly, Ala, D-Glu, D-Abu, D-Val, D-Ile, D-Leu, D-Tle, D-Cha, deleted;
[0758] A⁴ His or 3-Pal;
[0759] A⁵ is Phe, D-Phe, or D-2-Nal;
[0760] A⁶ is Arg;
[0761] A⁷ is Trp, 1-Nal, 2-Nal, Bal, or D-Trp;
[0762] A⁸ is β-Ala, A6c, Ahx, Apn, Gaba, Ala, Aha, D-Ala or deleted;
[0763] A⁹ is Lys, Cys, D-Cys, or Pen;
[0764] A¹⁰ is deleted.
[0765] wherein A² and A⁹ are pairwise selected to form a disulfide or lactam bridge.

[0766] 56. The method of embodiment 55, wherein the MC4R agonist of Formula (I-b) is selected from:

(SEQ ID NO: 1)
Ac-Nle-c(Asp-His-D-Phe-Arg-Trp-β-Ala-Lys)-NH₂;
(SEQ ID NO: 2)
Ac-Nle-c(Asp-His-D-Phe-Arg-Trp-A6c-Lys)-NH₂;
(SEQ ID NO: 3)
Ac-Nle-c(Cys-His-D-Phe-Arg-Trp-Ahx-Cys)-NH₂;
(SEQ ID NO: 7)
Ac-Nle-c(Cys-His-D-Phe-Arg-Trp-Apn-Cys)-NH₂;
(SEQ ID NO: 8)
Ac-Nle-c(Asp-His-D-Phe-Arg-Trp-Apn-Lys)-NH₂;
(SEQ ID NO: 9)
Ac-A6c-c(Asp-His-D-Phe-Arg-Trp-Gaba-Lys)-NH₂;
(SEQ ID NO: 10)
Ac-D-2-Nal-c(Asp-His-D-Phe-Arg-Trp-Gaba-Lys)-NH₂;
(SEQ ID NO: 11)
Ac-Cha-c(Asp-His-D-Phe-Arg-Trp-Gaba-Lys)-NH₂;
(SEQ ID NO: 12)
Ac-Nle-c(Asp-His-D-Phe-Arg-Trp-Gaba-Lys)-NH₂;
(SEQ ID NO: 13)
Ac-Nle-c(Cys-D-Ala-His-D-Phe-Arg-Trp-Cys)-NH₂;
(SEQ ID NO: 14)
Ac-Nle-c(Cys-β-Ala-His-D-Phe-Arg-Trp-Cys)-NH₂;
(SEQ ID NO: 15)
Ac-Nle-c(Cys-Gaba-His-D-Phe-Arg-Trp-Cys)-NH₂;
(SEQ ID NO: 16)
Ac-Nle-c(Cys-Aib-His-D-Phe-Arg-Trp-Cys)-NH₂;
(SEQ ID NO: 17)
Ac-Nle-c(Cys-Gly-His-D-Phe-Arg-Trp-Cys)-NH₂;
(SEQ ID NO: 18)
Ac-Nle-c(D-Cys-Ala-His-D-Phe-Arg-Trp-Cys)-NH₂;
(SEQ ID NO: 19)
Ac-Nle-c(D-Cys-D-Ala-His-D-Phe-Arg-Trp-Cys)-NH₂;
(SEQ ID NO: 20)
Ac-Nle-c(D-Cys-β-Ala-His-D-Phe-Arg-Trp-Cys)-NH₂;
(SEQ ID NO: 21)
Ac-Nle-c(D-Cys-Gaba-His-D-Phe-Arg-Trp-Cys)-NH₂;
(SEQ ID NO: 22)
Ac-Nle-c(D-Cys-Aib-His-D-Phe-Arg-Trp-Cys)-NH₂;
(SEQ ID NO: 23)
Ac-Nle-c(D-Cys-Gly-His-D-Phe-Arg-Trp-Cys)-NH₂;
(SEQ ID NO: 24)
Ac-Nle-c(Cys-D-Ala-His-D-Phe-Arg-Trp-D-Cys)-NH₂;
(SEQ ID NO: 25)
Ac-Nle-c(Cys-β-Ala-His-D-Phe-Arg-Trp-D-Cys)-NH₂;
(SEQ ID NO: 26)
Ac-Nle-c(Cys-Gaba-His-D-Phe-Arg-Trp-D-Cys)-NH₂;
(SEQ ID NO: 27)
Ac-Nle-c(Cys-Aib-His-D-Phe-Arg-Trp-D-Cys)-NH₂;
(SEQ ID NO: 28)
Ac-Nle-c(Cys-Gly-His-D-Phe-Arg-Trp-D-Cys)-NH₂;
(SEQ ID NO: 29)
Ac-Nle-c(D-Cys-Ala-His-D-Phe-Arg-Trp-D-Cys)-NH₂;
(SEQ ID NO: 30)
Ac-Nle-c(D-Cys-D-Ala-His-D-Phe-Arg-Trp-D-Cys)-NH₂;
(SEQ ID NO: 31)
Ac-Nle-c(D-Cys-β-Ala-His-D-Phe-Arg-Trp-D-Cys)-NH₂;
(SEQ ID NO: 32)
Ac-Nle-c(D-Cys-Gaba-His-D-Phe-Arg-Trp-D-Cys)-NH₂;
(SEQ ID NO: 33)
Ac-Nle-c(D-Cys-Aib-His-D-Phe-Arg-Trp-D-Cys)-NH₂;
(SEQ ID NO: 34)
Ac-Oic-c(Asp-His-D-Phe-Arg-Trp-Gaba-Lys)-NH₂;
(SEQ ID NO: 35)
Ac-Chg-c(Asp-His-D-Phe-Arg-Trp-Gaba-Lys)-NH₂;
(SEQ ID NO: 36)
Ac-hCha-c(Asp-His-D-Phe-Arg-Trp-Gaba-Lys)-NH₂;
(SEQ ID NO: 37)
Ac-D-Cha-c(Asp-His-D-Phe-Arg-Trp-Gaba-Lys)-NH₂;
(SEQ ID NO: 38)
Ac-D-hCha-c(Asp-His-D-Phe-Arg-Trp-Gaba-Lys)-NH₂;
(SEQ ID NO: 39)
Ac-Nip-c(Asp-His-D-Phe-Arg-Trp-Gaba-Lys)-NH₂;
(SEQ ID NO: 40)
Ac-hPro-c(Asp-His-D-Phe-Arg-Trp-Gaba-Lys)-NH₂;
(SEQ ID NO: 41)
Ac-hLeu-c(Asp-His-D-Phe-Arg-Trp-Gaba-Lys)-NH₂;
(SEQ ID NO: 42)
Ac-Phe-c(Asp-His-D-Phe-Arg-Trp-Gaba-Lys)-NH₂;
(SEQ ID NO: 43)
Ac-D-Phe-c(Asp-His-D-Phe-Arg-Trp-Gaba-Lys)-NH₂;
(SEQ ID NO: 44)
Ac-D-Chg-c(Asp-His-D-Phe-Arg-Trp-Gaba-Lys)-NH₂;
(SEQ ID NO: 47)
Ac-hPhe-c(Asp-His-D-Phe-Arg-Trp-Gaba-Lys)-NH₂;
(SEQ ID NO: 48)
Ac-β-hMet-c(Asp-His-D-Phe-Arg-Trp-Gaba-Lys)-NH₂;
(SEQ ID NO: 49)
Ac-Gaba-c(Asp-His-D-Phe-Arg-Trp-Gaba-Lys)-NH₂;
(SEQ ID NO: 50)
Ac-Cha-c(Asp-His-D-Phe-Arg-D-Trp-Ala-Lys)-NH₂;
(SEQ ID NO: 51)
Ac-hCha-c(Asp-His-D-Phe-Arg-D-Trp-Ala-Lys)-NH₂;
(SEQ ID NO: 52)
Ac-Leu-c(Asp-His-D-Phe-Arg-D-Trp-Ala-Lys)-NH₂;
(SEQ ID NO: 53)
Ac-hLeu-c(Asp-His-D-Phe-Arg-D-Trp-Ala-Lys)-NH₂;
(SEQ ID NO: 54)
Ac-Phe-c(Asp-His-D-Phe-Arg-D-Trp-Ala-Lys)-NH₂;
(SEQ ID NO: 55)
Ac-Nle-c(Asp-His-D-Phe-Arg-D-Trp-D-Ala-Lys)-NH₂;
(SEQ ID NO: 56)
Ac-Nle-c(Asp-His-D-Phe-Arg-D-Trp-β-Ala-Lys)-NH₂;
(SEQ ID NO: 57)
Ac-Nle-c(Asp-His-D-Phe-Arg-D-Trp-Gaba-Lys)-NH₂;
(SEQ ID NO: 58)
Ac-Nle-c(Asp-His-D-Phe-Arg-D-Trp-Aha-Lys)-NH₂;
(SEQ ID NO: 59)
Ac-Nle-c(Asp-His-D-Phe-Arg-D-Trp-Apn-Lys)-NH₂;
(SEQ ID NO: 60)
Ac-Nle-c(Cys-His-D-Phe-Arg-D-Trp-Apn-Cys)-NH₂;
(SEQ ID NO: 61)
Ac-Nle-c(Cys-His-D-Phe-Arg-D-Trp-Gaba-Cys)-NH₂;
(SEQ ID NO: 62)
Ac-Nle-c(Cys-His-D-Phe-Arg-D-Trp-Ahx-Cys)-NH₂;
(SEQ ID NO: 63)
Ac-Nle-c(Cys-His-D-Phe-Arg-D-Trp-β-Ala-Cys)-NH₂;
(SEQ ID NO: 64)
Ac-Nle-c(Cys-His-D-Phe-Arg-D-Trp-D-Ala-Cys)-NH₂;
(SEQ ID NO: 65)
Ac-Nle-c(Cys-D-Ala-His-D-2-Nal-Arg-Trp-Cys)-NH₂;
(SEQ ID NO: 66)
Ac-Nle-c(Cys-D-Ala-His-D-2-Nal-Arg-2-Nal-Cys)-NH₂;
(SEQ ID NO: 67)
Ac-Nle-c(Cys-D-Ala-His-D-2-Nal-Arg-1-Nal-Cys)-NH₂;
(SEQ ID NO: 70)
Ac-Nle-c(Cys-D-Ala-His-D-Phe-Arg-2-Nal-Cys)-NH₂;
(SEQ ID NO: 71)
Ac-Nle-c(Cys-D-Ala-His-D-Phe-Arg-1-Nal-Cys)-NH₂;
(SEQ ID NO: 72)
Ac-Nle-c(Cys-D-Ala-His-D-Phe-Arg-Bal-Cys)-NH₂;
(SEQ ID NO: 73)
Ac-Nle-c(Cys-D-Glu-His-D-Phe-Arg-Trp-Cys)-NH₂;
(SEQ ID NO: 74)
Ac-Nle-c(Asp-His-D-Phe-Arg-Trp-D-Ala-Lys)-NH₂;
(SEQ ID NO: 75)
Ac-Nle-c(Cys-D-Ala-His-D-2-Nal-Arg-Bal-Cys)-NH₂;
(SEQ ID NO: 76)
Ac-Nle-c(Pen-D-Ala-His-D-Phe-Arg-Trp-Cys)-NH₂;
(SEQ ID NO: 77)
Ac-Nle-c(Cys-D-Ala-His-D-Phe-Arg-Trp-Pen)-NH₂;
(SEQ ID NO: 78)
Ac-Nle-c(Pen-D-Ala-His-D-Phe-Arg-Trp-Pen)-NH₂;
(SEQ ID NO: 86)
Ac-Nle-c(Asp-D-Ala-His-D-Phe-Arg-Trp-Lys)-NH₂;
(SEQ ID NO: 87)
Ac-Nle-c(Asp-D-Ala-His-D-Phe-Arg-Bal-Lys)-NH₂;
(SEQ ID NO: 89)
Ac-Nle-c(Cys-D-Abu-His-D-Phe-Arg-Trp-Cys)-NH₂;
(SEQ ID NO: 90)
Ac-Nle-c(Cys-D-Val-His-D-Phe-Arg-Trp-Cys)-NH₂;
(SEQ ID NO: 91)
Ac-Nle-c(Cys-D-Ile-His-D-Phe-Arg-Trp-Cys)-NH₂;
(SEQ ID NO: 92)
Ac-Nle-c(Cys-D-Leu-His-D-Phe-Arg-Trp-Cys)-NH₂;
(SEQ ID NO: 93)
Ac-Nle-c(Cys-D-Tle-His-D-Phe-Arg-Trp-Cys)-NH₂;
(SEQ ID NO: 94)
Ac-Nle-c(Cys-D-Cha-His-D-Phe-Arg-Trp-Cys)-NH₂;
(SEQ ID NO: 95)
Ac-Nle-c(Pen-His-D-Phe-Arg-Trp-Gaba-Cys)-NH₂;
(SEQ ID NO: 96)
Ac-Nle-c(Cys-His-D-Phe-Arg-Trp-Gaba-Pen)-NH₂;
(SEQ ID NO: 97)
Ac-Nle-c(Pen-His-D-Phe-Arg-Trp-Gaba-Pen)-NH₂;
(SEQ ID NO: 98)
Ac-Leu-c(Cys-His-D-Phe-Arg-Trp-Gaba-Cys)-NH₂;
(SEQ ID NO: 99)
Ac-Cha-c(Cys-His-D-Phe-Arg-Trp-Gaba-Cys)-NH₂;
(SEQ ID NO: 100)
Ac-Ile-c(Cys-His-D-Phe-Arg-Trp-Gaba-Cys)-NH₂;
(SEQ ID NO: 101)
Ac-Phe-c(Cys-His-D-Phe-Arg-Trp-Gaba-Cys)-NH₂;
(SEQ ID NO: 102)
Ac-Val-c(Cys-His-D-Phe-Arg-Trp-Gaba-Cys)-NH₂;
(SEQ ID NO: 103)
Ac-2-Nal-c(Cys-His-D-Phe-Arg-Trp-Gaba-Cys)-NH₂;
(SEQ ID NO: 106)
Ac-Nle-c(Cys-3-Pal-D-Phe-Arg-Trp-Gaba-Cys)-NH₂;
(SEQ ID NO: 108)
Ac-Nle-c(Cys-His-Phe-Arg-D-Trp-Gaba-Cys)-NH₂;
(SEQ ID NO: 109)
Ac-Nle-c(Asp-His-D-2-Nal-Arg-Trp-Ala-Lys)-NH₂;
(SEQ ID NO: 110)
Ac-Nle-c(Asp-His-D-2-Nal-Arg-Trp-β-Ala-Lys)-NH₂;
(SEQ ID NO: 111)
Ac-Nle-c(Cys-His-D-2-Nal-Arg-Trp-Gaba-Cys)-NH₂;
(SEQ ID NO: 112)
Ac-Nle-c(Cys-His-D-2-Nal-Arg-Trp-Ahx-Cys)-NH₂;
(SEQ ID NO: 113)
Ac-hPhe-c(Asp-His-D-2-Nal-Arg-Trp-Gaba-Lys)-NH₂;
(SEQ ID NO: 114)
Ac-Cha-c(Asp-His-D-2-Nal-Arg-Trp-Gaba-Lys)-NH₂;
(SEQ ID NO: 139)
Ac-Arg-c(Cys-D-Ala-His-D-2-Nal-Arg-Trp-Cys)-NH₂;
(SEQ ID NO: 140)
Ac-Arg-c(Cys-D-Ala-His-D-Phe-Arg-Trp-Cys)-NH₂;
(SEQ ID NO: 141)
Ac-D-Arg-c(Cys-D-Ala-His-D-Phe-Arg-Trp-Cys)-NH₂;
(SEQ ID NO: 142)
Ac-D-Arg-c(Cys-D-Ala-His-D-Phe-Arg-Trp-Pen)-NH₂;
(SEQ ID NO: 143)
Ac-D-Arg-c(Cys-His-D-Phe-Arg-Trp-Gaba-Pen)-NH₂;
(SEQ ID NO: 144)
Ac-Arg-c(Cys-His-D-Phe-Arg-Trp-Gaba-Pen)-NH₂;
(SEQ ID NO: 145)
Ac-Arg-c(Cys-D-Ala-His-D-Phe-Arg-Trp-Pen)-NH₂;
(SEQ ID NO: 146)
Ac-D-Arg-c(Asp-His-D-Phe-Arg-Trp-Ala-Lys)-NH₂;
and
(SEQ ID NO: 147)
Ac-Arg-c(Asp-His-D-Phe-Arg-Trp-Ala-Lys)-NH₂.

[0767] 57. The method of any of the preceding embodiments, wherein the MC4R agonist is a compound of Formula (I-c):

[chemical structure]

[0768] or a pharmaceutically acceptable salt thereof, wherein:
[0769] A² is Asp, Cys, D-Cys, or Pen;
[0770] A³ is D-Ala, -Ala, Gaba, Aib, Gly, Ala, Aib, Dl-Glu, D-Abu, D-Val, D-Ile, D-Leu, D-Tle, D-Cha, or deleted;
[0771] A⁴ is His or 3-Pal;
[0772] A⁵ is D-Phe, D-2-Nal, or Phe;
[0773] A⁶ is Arg;
[0774] A⁷ is Trp, D-Trp, 2-Nal, 1-Nal, Bal;
[0775] A⁸ is β-Ala, A6c, Ahx, Apn, Gaba, D-Ala, Aha, Ala or deleted;
[0776] A⁹ is Lys, Cys, D-Cys or Pen; and
[0777] A¹⁰ is deleted,
[0778] wherein A² and A⁹ are pairwise selected to form a disulfide or lactam bridge.

[0779] 58. The method of embodiment 58, wherein the MC4R agonist of Formula (I-c) is selected from:

(SEQ ID NO: 1)
Ac-Nle-c(Asp-His-D-Phe-Arg-Trp-β-Ala-Lys)-NH₂;
(SEQ ID NO: 2)
Ac-Nle-c(Asp-His-D-Phe-Arg-Trp-A6c-Lys)-NH₂;
(SEQ ID NO: 3)
Ac-Nle-c(Cys-His-D-Phe-Arg-Trp-Ahx-Cys)-NH₂;
(SEQ ID NO: 7)
Ac-Nle-c(Cys-His-D-Phe-Arg-Trp-Apn-Cys)-NH₂;
(SEQ ID NO: 8)
Ac-Nle-c(Asp-His-D-Phe-Arg-Trp-Apn-Lys)-NH₂;
(SEQ ID NO: 12)
Ac-Nle-c(Asp-His-D-Phe-Arg-Trp-Gaba-Lys)-NH₂;
(SEQ ID NO: 13)
Ac-Nle-c(Cys-D-Ala-His-D-Phe-Arg-Trp-Cys)-NH₂;
(SEQ ID NO: 14)
Ac-Nle-c(Cys-β-Ala-His-D-Phe-Arg-Trp-Cys)-NH₂;
(SEQ ID NO: 15)
Ac-Nle-c(Cys-Gaba-His-D-Phe-Arg-Trp-Cys)-NH₂;
(SEQ ID NO: 16)
Ac-Nle-c(Cys-Aib-His-D-Phe-Arg-Trp-Cys)-NH₂;
(SEQ ID NO: 17)
Ac-Nle-c(Cys-Gly-His-D-Phe-Arg-Trp-Cys)-NH₂;
(SEQ ID NO: 18)
Ac-Nle-c(D-Cys-Ala-His-D-Phe-Arg-Trp-Cys)-NH₂;
(SEQ ID NO: 19)
Ac-Nle-c(D-Cys-D-Ala-His-D-Phe-Arg-Trp-Cys)-NH₂;
(SEQ ID NO: 20)
Ac-Nle-c(D-Cys-β-Ala-His-D-Phe-Arg-Trp-Cys)-NH₂;
(SEQ ID NO: 21)
Ac-Nle-c(D-Cys-Gaba-His-D-Phe-Arg-Trp-Cys)-NH₂;
(SEQ ID NO: 22)
Ac-Nle-c(D-Cys-Aib-His-D-Phe-Arg-Trp-Cys)-NH₂;
(SEQ ID NO: 23)
Ac-Nle-c(D-Cys-Gly-His-D-Phe-Arg-Trp-Cys)-NH₂;
(SEQ ID NO: 24)
Ac-Nle-c(Cys-D-Ala-His-D-Phe-Arg-Trp-D-Cys)-NH₂;
(SEQ ID NO: 25)
Ac-Nle-c(Cys-β-Ala-His-D-Phe-Arg-Trp-D-Cys)-NH₂;
(SEQ ID NO: 26)
Ac-Nle-c(Cys-Gaba-His-D-Phe-Arg-Trp-D-Cys)-NH₂;
(SEQ ID NO: 27)
Ac-Nle-c(Cys-Aib-His-D-Phe-Arg-Trp-D-Cys)-NH₂;
(SEQ ID NO: 28)
Ac-Nle-c(Cys-Gly-His-D-Phe-Arg-Trp-D-Cys)-NH₂;
(SEQ ID NO: 29)
Ac-Nle-c(D-Cys-Ala-His-D-Phe-Arg-Trp-D-Cys)-NH₂;
(SEQ ID NO: 30)
Ac-Nle-c(D-Cys-D-Ala-His-D-Phe-Arg-Trp-D-Cys)-NH₂;
(SEQ ID NO: 31)
Ac-Nle-c(D-Cys-β-Ala-His-D-Phe-Arg-Trp-D-Cys)-NH₂;
(SEQ ID NO: 32)
Ac-Nle-c(D-Cys-Gaba-His-D-Phe-Arg-Trp-D-Cys)-NH₂;
(SEQ ID NO: 33)
Ac-Nle-c(D-Cys-Aib-His-D-Phe-Arg-Trp-D-Cys)-NH₂;
(SEQ ID NO: 55)
Ac-Nle-c(Asp-His-D-Phe-Arg-D-Trp-D-Ala-Lys)-NH₂;
(SEQ ID NO: 56)
Ac-Nle-c(Asp-His-D-Phe-Arg-D-Trp-β-Ala-Lys)-NH₂;
(SEQ ID NO: 57)
Ac-Nle-c(Asp-His-D-Phe-Arg-D-Trp-Gaba-Lys)-NH₂;
(SEQ ID NO: 58)
Ac-Nle-c(Asp-His-D-Phe-Arg-D-Trp-Aha-Lys)-NH₂;
(SEQ ID NO: 59)
Ac-Nle-c(Asp-His-D-Phe-Arg-D-Trp-Apn-Lys)-NH₂;
(SEQ ID NO: 60)
Ac-Nle-c(Cys-His-D-Phe-Arg-D-Trp-Apn-Cys)-NH₂;
(SEQ ID NO: 61)
Ac-Nle-c(Cys-His-D-Phe-Arg-D-Trp-Gaba-Cys)-NH₂;
(SEQ ID NO: 62)
Ac-Nle-c(Cys-His-D-Phe-Arg-D-Trp-Ahx-Cys)-NH₂;
(SEQ ID NO: 63)
Ac-Nle-c(Cys-His-D-Phe-Arg-D-Trp-β-Ala-Cys)-NH₂;
(SEQ ID NO: 64)
Ac-Nle-c(Cys-His-D-Phe-Arg-D-Trp-D-Ala-Cys)-NH₂;
(SEQ ID NO: 65)
Ac-Nle-c(Cys-D-Ala-His-D-2-Nal-Arg-Trp-Cys)-NH₂;
(SEQ ID NO: 66)
Ac-Nle-c(Cys-D-Ala-His-D-2-Nal-Arg-2-Nal-Cys)-NH₂;
(SEQ ID NO: 67)
Ac-Nle-c(Cys-D-Ala-His-D-2-Nal-Arg-1-Nal-Cys)-NH₂;
(SEQ ID NO: 70)
Ac-Nle-c(Cys-D-Ala-His-D-Phe-Arg-2-Nal-Cys)-NH₂;
(SEQ ID NO: 71)
Ac-Nle-c(Cys-D-Ala-His-D-Phe-Arg-1-Nal-Cys)-NH₂;
(SEQ ID NO: 72)
Ac-Nle-c(Cys-D-Ala-His-D-Phe-Arg-Bal-Cys)-NH₂;
(SEQ ID NO: 73)
Ac-Nle-c(Cys-D-Glu-His-D-Phe-Arg-Trp-Cys)-NH₂;
(SEQ ID NO: 74)
Ac-Nle-c(Asp-His-D-Phe-Arg-Trp-D-Ala-Lys)-NH₂;
(SEQ ID NO: 75)
Ac-Nle-c(Cys-D-Ala-His-D-2-Nal-Arg-Bal-Cys)-NH₂;
(SEQ ID NO: 76)
Ac-Nle-c(Pen-D-Ala-His-D-Phe-Arg-Trp-Cys)-NH₂;
(SEQ ID NO: 77)
Ac-Nle-c(Cys-D-Ala-His-D-Phe-Arg-Trp-Pen)-NH₂;
(SEQ ID NO: 78)
Ac-Nle-c(Pen-D-Ala-His-D-Phe-Arg-Trp-Pen)-NH₂;
(SEQ ID NO: 86)
Ac-Nle-c(Asp-D-Ala-His-D-Phe-Arg-Trp-Lys)-NH₂;
(SEQ ID NO: 87)
Ac-Nle-c(Asp-D-Ala-His-D-Phe-Arg-Bal-Lys)-NH₂;
(SEQ ID NO: 89)
Ac-Nle-c(Cys-D-Abu-His-D-Phe-Arg-Trp-Cys)-NH₂;
(SEQ ID NO: 90)
Ac-Nle-c(Cys-D-Val-His-D-Phe-Arg-Trp-Cys)-NH₂;
(SEQ ID NO: 91)
Ac-Nle-c(Cys-D-Ile-His-D-Phe-Arg-Trp-Cys)-NH₂;
(SEQ ID NO: 92)
Ac-Nle-c(Cys-D-Leu-His-D-Phe-Arg-Trp-Cys)-NH₂;
(SEQ ID NO: 93)
Ac-Nle-c(Cys-D-Tle-His-D-Phe-Arg-Trp-Cys)-NH₂;
(SEQ ID NO: 94)
Ac-Nle-c(Cys-D-Cha-His-D-Phe-Arg-Trp-Cys)-NH₂;
(SEQ ID NO: 95)
Ac-Nle-c(Pen-His-D-Phe-Arg-Trp-Gaba-Cys)-NH₂;
(SEQ ID NO: 96)
Ac-Nle-c(Cys-His-D-Phe-Arg-Trp-Gaba-Pen)-NH₂;
(SEQ ID NO: 97)
Ac-Nle-c(Pen-His-D-Phe-Arg-Trp-Gaba-Pen)-NH₂;
(SEQ ID NO: 106)
Ac-Nle-c(Cys-3-Pal-D-Phe-Arg-Trp-Gaba-Cys)-NH₂;
(SEQ ID NO: 108)
Ac-Nle-c(Cys-His-Phe-Arg-D-Trp-Gaba-Cys)-NH₂;
(SEQ ID NO: 109)
Ac-Nle-c(Asp-His-D-2-Nal-Arg-Trp-Ala-Lys)-NH₂;
(SEQ ID NO: 110)
Ac-Nle-c(Asp-His-D-2-Nal-Arg-Trp-β-Ala-Lys)-NH₂;
(SEQ ID NO: 111)
Ac-Nle-c(Cys-His-D-2-Nal-Arg-Trp-Gaba-Cys)-NH₂;
and
(SEQ ID NO: 112)
Ac-Nle-c(Cys-His-D-2-Nal-Arg-Trp-Ahx-Cys)-NH₂.

[0780] 59. The method of any of the preceding claims, wherein the MC4R agonist is a compound of Formula (I-d):

[chemical structure]

[0781] or a pharmaceutically acceptable salt thereof, wherein:
[0782] A² is Cys;
[0783] A³ is deleted;
[0784] A⁴ is His;
[0785] A⁵ is D-Phe or D-(Et)Tyr;
[0786] A⁶ is Arg or hArg;
[0787] A⁷ is Trp or Bip;
[0788] A⁸ is Ala, β-Ala, or Gaba;
[0789] A⁹ is D-Cys; and
[0790] A¹⁰ is Thr.

[0791] 60. The method of embodiment 60, wherein the MC4R agonist of Formula (I-d) is selected from:

(SEQ ID NO: 4)
D-Phe-c(Cys-His-D-Phe-Arg-Trp-Ala-D-Cys)-Thr-NH₂;
(SEQ ID NO: 5)
D-Phe-c(Cys-His-D-Phe-Arg-Trp-β-Ala-D-Cys)-Thr-NH₂;
(SEQ ID NO: 6)
D-Phe-c(Cys-His-D-Phe-Arg-Trp-Gaba-D-Cys)-Thr-NH₂;
(SEQ ID NO: 79)
D-Phe-c(Cys-His-D-Phe-hArg-Trp-β-Ala-D-Cys)-Thr-NH₂;
(SEQ ID NO: 80)
D-Phe-c(Cys-His-D-(Et)Tyr-Arg-Trp-β-Ala-D-Cys)-Thr-NH₂;
(SEQ ID NO: 81)
D-Phe-c(Cys-His-D-Phe-Arg-Bip-β-Ala-D-Cys)-Thr-NH₂;
(SEQ ID NO: 82)
D-Phe-c(Cys-His-D-(Et)Tyr-hArg-Trp-β-Ala-D-Cys)-Thr-NH₂;
(SEQ ID NO: 83)
D-Phe-c(Cys-His-D-Phe-hArg-Bip-β-Ala-D-Cys)-Thr-NH₂;
and
(SEQ ID NO: 84)
D-Phe-c(Cys-His-D-(Et)Tyr-hArg-Bip-β-Ala-D-Cys)-Thr-NH₂.

[0792] 61. The method of any of the preceding embodiments, wherein the MC4R agonist is a compound of Formula (XII-a):

[chemical structure]

[0793] or a pharmaceutically acceptable salt thereof, wherein:
[0794] Aaa and Bbb are selected from Cys, hCys, Pen capable of establishing a disulfide bridge; or
[0795] Glu, Asp, Lys, Orn, Dpr, Dbu capable of establishing a lactam bridge;
[0796] Xxx is Asn, Gln, Ser, Thr; and
[0797] Yyy is Lys, Arg, D-Lys, D-Arg.

[0798] 62. The method embodiment 61, wherein the MC4R agonist of Formula (XII-a) is selected from:

(SEQ ID NO: 635)
H-Arg-c(hCys-Asn-D-Phe-Arg-Trp-Pen)-NH₂;
(SEQ ID NO: 643)
H-Lys-c(hCys-Asn-D-Phe-Arg-Trp-Pen)-NH₂;
(SEQ ID NO: 646)
H-D-Lys-c(hCys-Asn-D-Phe-Arg-Trp-Pen)-NH₂;
(SEQ ID NO: 650)
H-Arg-c(hCys-Gln-D-Phe-Arg-Trp-Pen)-NH₂;
(SEQ ID NO: 653)
H-D-Arg-c(hCys-Gln-D-Phe-Arg-Trp-Pen)-NH₂;
(SEQ ID NO: 658)
H-Lys-c(hCys-Gln-D-Phe-Arg-Trp-Pen)-NH₂;
(SEQ ID NO: 661)
H-D-Lys-c(hCys-Gln-D-Phe-Arg-Trp-Pen)-NH₂;
(SEQ ID NO: 665)
H-Arg-c(hCys-Ser-D-Phe-Arg-Trp-Pen)-NH₂;
(SEQ ID NO: 668)
H-D-Arg-c(hCys-Ser-D-Phe-Arg-Trp-Pen)-NH₂;
(SEQ ID NO: 673)
H-Lys-c(hCys-Ser-D-Phe-Arg-Trp-Pen)-NH₂;
(SEQ ID NO: 676)
H-D-Lys-c(hCys-Ser-D-Phe-Arg-Trp-Pen)-NH₂;
(SEQ ID NO: 680)
H-Arg-c(hCys-Thr-D-Phe-Arg-Trp-Pen)-NH₂;
(SEQ ID NO: 683)
H-D-Arg-c(hCys-Thr-D-Phe-Arg-Trp-Pen)-NH₂;
(SEQ ID NO: 688)
H-Lys-c(hCys-Thr-D-Phe-Arg-Trp-Pen)-NH₂;
(SEQ ID NO: 691)
H-D-Lys-c(hCys-Thr-D-Phe-Arg-Trp-Pen)-NH₂;
and
(SEQ ID NO: 693)
H-D-Lys-c(hCys-Thr-D-Phe-Arg-Trp-Pen)-NH_{2.}

[0799] 63. The method of any of the preceding embodiments, wherein the MC4R agonist is a compound of Formula (XII-b):

[chemical structure]

[0800] or a pharmaceutically acceptable salt thereof, wherein:
[0801] Aaa and Bbb are selected from Cys, hCys, Pen capable of establishing a disulfide bridge; or
[0802] Glu, Asp, Lys, Orn, Dpr, Dbu capable of establishing a lactam bridge;
[0803] Xxx is Asn, Gln, Ser, Thr; and
[0804] Yyy is Lys, Arg, D-Lys, D-Arg.

[0805] 64. The method of embodiment 63, wherein the MC4R agonist of Formula (XII-b) is selected from:

(SEQ ID NO: 629)
Ac-Arg-c(hCys-Asn-D-Phe-Arg-Trp-Pen)-NH₂;
(SEQ ID NO: 630)
Ac-Arg-c(hCys-Gln-D-Phe-Arg-Trp-Pen)-NH₂;
(SEQ ID NO: 631)
Ac-Arg-c(hCys-Ser-D-Phe-Arg-Trp-Pen)-NH₂;
(SEQ ID NO: 632)
Ac-Arg-c(hCys-Thr-D-Phe-Arg-Trp-Pen)-NH₂;
(SEQ ID NO: 633)
Ac-Arg-c(Glu-Gln-D-Phe-Arg-Trp-Dpr)-NH₂;
(SEQ ID NO: 637
Ac-D-Arg-c(hCys-Asn-D-Phe-Arg-Trp-Pen)-NH₂;
(SEQ ID NO: 641)
Ac-Lys-c(hCys-Asn-D-Phe-Arg-Trp-Pen)-NH₂;
(SEQ ID NO: 645)
Ac-D-Lys-c(hCys-Asn-D-Phe-Arg-Trp-Pen)-NH₂;
(SEQ ID NO: 652)
Ac-D-Arg-c(hCys-Gln-D-Phe-Arg-Trp-Pen)-NH₂;
(SEQ ID NO: 656)
Ac-Lys-c(hCys-Gln-D-Phe-Arg-Trp-Pen)-NH₂;
(SEQ ID NO: 660)
Ac-D-Lys-c(hCys-Gln-D-Phe-Arg-Trp-Pen)-NH₂;
(SEQ ID NO: 667)
Ac-D-Arg-c(hCys-Ser-D-Phe-Arg-Trp-Pen)-NH₂;
(SEQ ID NO: 671)
Ac-Lys-c(hCys-Ser-D-Phe-Arg-Trp-Pen)-NH₂;
(SEQ ID NO: 675)
Ac-D-Lys-c(hCys-Ser-D-Phe-Arg-Trp-Pen)-NH₂;
(SEQ ID NO: 682)
Ac-D-Arg-c(hCys-Thr-D-Phe-Arg-Trp-Pen)-NH₂;
(SEQ ID NO: 686)
Ac-Lys-c(hCys-Thr-D-Phe-Arg-Trp-Pen)-NH₂;
(SEQ ID NO: 690)
Ac-D-Lys-c(hCys-Thr-D-Phe-Arg-Trp-Pen)-NH₂;
and
(SEQ ID NO: 692)
Ac-D-Lys-c(hCys-Thr-D-Phe-Arg-Trp-Pen)-NH₂.

[0806] 65. The method of any of the preceding embodiments, wherein the MC4R agonist is a compound of Formula (XII-c):

[chemical structure]

[0807] or a pharmaceutically acceptable salt thereof, wherein:
[0808] A₁ is H or Ac;
[0809] A₂ is OH or NH₂;
[0810] Yyy is L-Arg or D-Arg;
[0811] Aaa and Bbb are selected from Cys, hCys, and Pen capable of establishing a disulfide bridge; or
[0812] Glu, Asp, Lys, Orn, Dpr, and Dbu capable of establishing a lactam bridge; and
[0813] Xxx is Asn, Gln, Ser, or Thr.

[0814] 66. The method of embodiment 65, wherein the MC4R agonist of Formula (XII-c) is selected from:

(SEQ ID NO: 629)
Ac-Arg-c(hCys-Asn-D-Phe-Arg-Trp-Pen)-NH₂;
(SEQ ID NO: 630)
Ac-Arg-c(hCys-Gln-D-Phe-Arg-Trp-Pen)-NH₂;
(SEQ ID NO: 631)
Ac-Arg-c(hCys-Ser-D-Phe-Arg-Trp-Pen)-NH₂;
(SEQ ID NO: 632)
Ac-Arg-c(hCys-Thr-D-Phe-Arg-Trp-Pen)-NH₂;
(SEQ ID NO: 633)
Ac-Arg-c(Glu-Gln-D-Phe-Arg-Trp-Dpr)-NH₂;
(SEQ ID NO: 634)
Ac-Arg-c(hCys-Asn-D-Phe-Arg-Trp-Pen)-OH;
(SEQ ID NO: 635)
H-Arg-c(hCys-Asn-D-Phe-Arg-Trp-Pen)-NH₂;
(SEQ ID NO: 636)
H-Arg-c(hCys-Asn-D-Phe-Arg-Trp-Pen)-OH;
(SEQ ID NO: 637)
Ac-D-Arg-c(hCys-Asn-D-Phe-Arg-Trp-Pen)-NH₂;
(SEQ ID NO: 638)
H-D-Arg-c(hCys-Asn-D-Phe-Arg-Trp-Pen)-NH₂;
(SEQ ID NO: 639)
Ac-D-Arg-c(hCys-Asn-D-Phe-Arg-Trp-Pen)-OH;
(SEQ ID NO: 640)
H-D-Arg-c(hCys-Asn-D-Phe-Arg-Trp-Pen)-OH;
(SEQ ID NO: 649)
Ac-Arg-c(hCys-Gln-D-Phe-Arg-Trp-Pen)-OH;
(SEQ ID NO: 650)
H-Arg-c(hCys-Gln-D-Phe-Arg-Trp-Pen)-NH₂;
(SEQ ID NO: 651)
H-Arg-c(hCys-Gln-D-Phe-Arg-Trp-Pen)-OH;
(SEQ ID NO: 652)
Ac-D-Arg-c(hCys-Gln-D-Phe-Arg-Trp-Pen)-NH₂;
(SEQ ID NO: 653)
H-D-Arg-c(hCys-Gln-D-Phe-Arg-Trp-Pen)-NH₂;
(SEQ ID NO: 654)
Ac-D-Arg-c(hCys-Gln-D-Phe-Arg-Trp-Pen)-OH;
(SEQ ID NO: 655)
H-D-Arg-c(hCys-Gln-D-Phe-Arg-Trp-Pen)-OH;
(SEQ ID NO: 664)
Ac-Arg-c(hCys-Ser-D-Phe-Arg-Trp-Pen)-OH;
(SEQ ID NO: 665)
H-Arg-c(hCys-Ser-D-Phe-Arg-Trp-Pen)-NH₂;
(SEQ ID NO: 666)
H-Arg-c(hCys-Ser-D-Phe-Arg-Trp-Pen)-OH;
(SEQ ID NO: 667)
Ac-D-Arg-c(hCys-Ser-D-Phe-Arg-Trp-Pen)-NH₂;
(SEQ ID NO: 668)
H-D-Arg-c(hCys-Ser-D-Phe-Arg-Trp-Pen)-NH₂;
(SEQ ID NO: 669)
Ac-D-Arg-c(hCys-Ser-D-Phe-Arg-Trp-Pen)-OH;
(SEQ ID NO: 670)
H-D-Arg-c(hCys-Ser-D-Phe-Arg-Trp-Pen)-OH;
(SEQ ID NO: 679)
Ac-Arg-c(hCys-Thr-D-Phe-Arg-Trp-Pen)-OH;
(SEQ ID NO: 680)
H-Arg-c(hCys-Thr-D-Phe-Arg-Trp-Pen)-NH₂;
(SEQ ID NO: 681)
H-Arg-c(hCys-Thr-D-Phe-Arg-Trp-Pen)-OH;
(SEQ ID NO: 682)
Ac-D-Arg-c(hCys-Thr-D-Phe-Arg-Trp-Pen)-NH₂;
(SEQ ID NO: 683)
H-D-Arg-c(hCys-Thr-D-Phe-Arg-Trp-Pen)-NH₂;
(SEQ ID NO: 684)
Ac-D-Arg-c(hCys-Thr-D-Phe-Arg-Trp-Pen)-OH;
and
(SEQ ID NO: 685)
H-D-Arg-c(hCys-Thr-D-Phe-Arg-Trp-Pen)-OH.

[0815] 67. The method of any of the preceding embodiments, wherein the MC4R agonist is a compound of Formula (XII-d):

[chemical structure]

[0816] or a pharmaceutically acceptable salt thereof, wherein:
[0817] A₁ is H or Ac;
[0818] A₂ is OH or NH₂;
[0819] Yyy is L-Lys or D-Lys;
[0820] Aaa and Bbb are selected from Cys, hCys, and Pen capable of establishing a disulfide bridge; or
[0821] Glu, Asp, Lys, Orn, Dpr, and Dbu capable of establishing a lactam bridge; and Xxx is Asn, Gln, Ser, or Thr.

[0822] 68. The method of embodiment 67, wherein the MC4R agonist of Formula (XII-d) is selected from:

(SEQ ID NO: 641)
Ac-Lys-c(hCys-Asn-D-Phe-Arg-Trp-Pen)-NH₂;
(SEQ ID NO: 642)
Ac-Lys-c(hCys-Asn-D-Phe-Arg-Trp-Pen)-OH;
(SEQ ID NO: 643)
H-Lys-c(hCys-Asn-D-Phe-Arg-Trp-Pen)-NH₂;
(SEQ ID NO: 644)
H-Lys-c(hCys-Asn-D-Phe-Arg-Trp-Pen)-OH;
(SEQ ID NO: 645)
Ac-D-Lys-c(hCys-Asn-D-Phe-Arg-Trp-Pen)-NH₂;
(SEQ ID NO: 646)
H-D-Lys-c(hCys-Asn-D-Phe-Arg-Trp-Pen)-NH₂;
(SEQ ID NO: 647)
Ac-D-Lys-c(hCys-Asn-D-Phe-Arg-Trp-Pen)-OH;
(SEQ ID NO: 648)
H-D-Lys-c(hCys-Asn-D-Phe-Arg-Trp-Pen)-OH;
(SEQ ID NO: 656)
Ac-Lys-c(hCys-Gln-D-Phe-Arg-Trp-Pen)-NH₂;
(SEQ ID NO: 657)
Ac-Lys-c(hCys-Gln-D-Phe-Arg-Trp-Pen)-OH;
(SEQ ID NO: 658)
H-Lys-c(hCys-Gln-D-Phe-Arg-Trp-Pen)-NH₂;
(SEQ ID NO: 659)
H-Lys-c(hCys-Gln-D-Phe-Arg-Trp-Pen)-OH;
(SEQ ID NO: 660)
Ac-D-Lys-c(hCys-Gln-D-Phe-Arg-Trp-Pen)-NH₂;
(SEQ ID NO: 661)
H-D-Lys-c(hCys-Gln-D-Phe-Arg-Trp-Pen)-NH₂;
(SEQ ID NO: 662)
Ac-D-Lys-c(hCys-Gln-D-Phe-Arg-Trp-Pen)-OH;
(SEQ ID NO: 663)
H-D-Lys-c(hCys-Gln-D-Phe-Arg-Trp-Pen)-OH;
(SEQ ID NO: 671)
Ac-Lys-c(hCys-Ser-D-Phe-Arg-Trp-Pen)-NH₂;
(SEQ ID NO: 672)
Ac-Lys-c(hCys-Ser-D-Phe-Arg-Trp-Pen)-OH;
(SEQ ID NO: 673)
H-Lys-c(hCys-Ser-D-Phe-Arg-Trp-Pen)-NH₂;
(SEQ ID NO: 674)
H-Lys-c(hCys-Ser-D-Phe-Arg-Trp-Pen)-OH;
(SEQ ID NO: 675)
Ac-D-Lys-c(hCys-Ser-D-Phe-Arg-Trp-Pen)-NH₂;
(SEQ ID NO: 676)
H-D-Lys-c(hCys-Ser-D-Phe-Arg-Trp-Pen)-NH₂;
(SEQ ID NO: 677)
Ac-D-Lys-c(hCys-Ser-D-Phe-Arg-Trp-Pen)-OH;
(SEQ ID NO: 678)
H-D-Lys-c(hCys-Ser-D-Phe-Arg-Trp-Pen)-OH;
(SEQ ID NO: 686)
Ac-Lys-c(hCys-Thr-D-Phe-Arg-Trp-Pen)-NH₂;
(SEQ ID NO: 687)
Ac-Lys-c(hCys-Thr-D-Phe-Arg-Trp-Pen)-OH;
(SEQ ID NO: 688)
H-Lys-c(hCys-Thr-D-Phe-Arg-Trp-Pen)-NH₂;
(SEQ ID NO: 689)
H-Lys-c(hCys-Thr-D-Phe-Arg-Trp-Pen)-OH;
(SEQ ID NO: 690)
Ac-D-Lys-c(hCys-Thr-D-Phe-Arg-Trp-Pen)-NH₂;
(SEQ ID NO: 691)
H-D-Lys-c(hCys-Thr-D-Phe-Arg-Trp-Pen)-NH₂;
(SEQ ID NO: 692)
Ac-D-Lys-c(hCys-Thr-D-Phe-Arg-Trp-Pen)-NH₂,
and
(SEQ ID NO: 693)
H-D-Lys-c(hCys-Thr-D-Phe-Arg-Trp-Pen)-NH₂.

[0823] 69. The method of any of the preceding embodiments, wherein after administration of the MC4R agonist, the subject experiences a reduction in BMI of between about 5-10, e.g., after 16 weeks relative to the baseline BMI, e.g., the BMI of the subject prior to administration of the MC4R agonist.

[0824] 70. The method of any of the preceding embodiments, wherein after administration of the MC4R agonist, the subject experiences a reduction in BMI of between 5-10, e.g., after 16 weeks relative to the baseline BMI, e.g., the BMI of the subject prior to administration of the MC4R agonist, wherein the subject is a pediatric subject between 6 to less than 18 years of age.

[0825] 71. The method of any of the preceding embodiments, wherein after administration of the MC4R agonist, the subject experiences a reduction in BMI of between about 1-5, e.g., after 16 weeks relative to the baseline BMI, e.g., the BMI of the subject prior to administration of the MC4R agonist, wherein the subject is an adult subject equal to or greater than 18 years of age.

[0826] 72. The method of any of the preceding embodiments, wherein after administration of the MC4R agonist, the subject experiences a reduction in BMI between about 15-20%, e.g., after 16 weeks relative to the baseline BMI, e.g., the BMI of the subject prior to administration of the MC4R agonist.

[0827] 73. The method of any of the preceding embodiments, wherein after administration of the MC4R agonist, the subject experiences a reduction in BMI Z-Score between about 1-5, e.g., after 16 weeks relative to the baseline BMI Z-Score, e.g., the BMI Z-Score of the subject prior to administration of the MC4R agonist.

[0828] 74. The method of any of the preceding embodiments, wherein after administration of the MC4R agonist, the subject experiences a reduction in weight between about 10-20 kg, e.g., after 16 weeks relative to the baseline weight, e.g., the weight of the subject prior to administration of the MC4R agonist.

[0829] 75. The method of any of the preceding embodiments, wherein after administration of the MC4R agonist, the subject experiences a reduction in weight between about 15-20 kg, e.g., after 16 weeks relative to the baseline weight, e.g., the weight of the subject prior to administration of the MC4R agonist, wherein the subject is a pediatric subject between 6 to less than 18 years of age.

[0830] 76. The method of any of the preceding embodiments, wherein after administration of the MC4R agonist, the subject experiences a reduction in weight between about 5-10 kg, e.g., after 16 weeks relative to the baseline weight, e.g., the weight of the subject prior to administration of the MC4R agonist, wherein the subject is an adult subject equal to or greater than 18 years of age.

[0831] 77. The method of any of the preceding embodiments, wherein after administration of the MC4R agonist, the subject experiences a reduction in weight between about 10-20%, e.g., after 16 weeks relative to the baseline weight, e.g., the weight of the subject prior to administration of the MC4R agonist.

[0832] 78. The method of any of the preceding embodiments, wherein after administration of the MC4R agonist, the subject experiences a reduction in weight of between 15-20%, e.g., after 16 weeks relative to the baseline weight, e.g., the weight of the subject prior to administration of the MC4R agonist, wherein the subject is a pediatric subject between 6 to less than 18 years of age.

[0833] 79. The method of any of the preceding embodiments, wherein after administration of the MC4R agonist, the subject experiences a reduction in weight of between about 5-10%, e.g., after 16 weeks relative to the baseline weight, e.g., the weight of the subject prior to administration of the MC4R agonist, wherein the subject is an adult subject equal to or greater than 18 years of age.

[0834] 80. The method of any of the preceding embodiments, wherein after administration of the MC4R agonist, the subject experiences a reduction in the weekly average of the daily most hunger score of between about 1-5, e.g., after 16 weeks relative to the baseline weekly average of the daily most hunger score, e.g., the weekly average of the daily most hunger score of the subject prior to administration of the MC4R agonist.

[0835] 81. The method of any of the preceding embodiments, wherein after administration of the MC4R agonist, the subject experiences a reduction in BMI of between about 1-10, e.g., after 16 weeks relative to the baseline BMI, e.g., the BMI of the subject prior to administration of the MC4R agonist.

[0836] 82. The method of any of the preceding embodiments, wherein after administration of the MC4R agonist, the subject experiences a reduction in BMI of between 12-20%, e.g., after 16 weeks relative to the baseline BMI, e.g., the BMI of the subject prior to administration of the MC4R agonist.

[0837] 83. The method of any of the preceding embodiments, wherein after administration of the MC4R agonist, the subject experiences a reduction in the weekly average of the daily most hunger score of between about 1-5, e.g., after 16 weeks relative to the baseline weekly average of the daily most hunger score, e.g., the weekly average of the daily most hunger score of the subject prior to administration of the MC4R agonist.

[0838] 84. The method of any of the preceding embodiments, the method comprising administering to the subject a compound of Formula I (e.g., Formula (I), (I-a), (I-b), (I-c), and (I-d)) or Formula XII (e.g., Formula (XII) (Formula (XII), (XII-a), (XII-b), (XII-c), and (XII-d)), wherein upon administration of Formula I or Formula XII, the subject experiences one or more of:
[0839] (i) a BMI reduction ≥5% after 16 weeks from baseline for all subjects;
[0840] (ii) a mean reduction in BMI; ≥10% after 16 weeks from baseline for a subject completing the course of therapy;
[0841] (iii) a mean reduction in BMI of between 5-10, e.g., after 16 weeks from baseline;
[0842] (iv) a mean reduction in BMI of between 6-8, e.g., after 16 weeks from baseline;
[0843] (v) a mean reduction in BMI of between 2-5, e.g., after 16 weeks from baseline;
[0844] (vi) a mean percentage reduction in BMI of between about 15-20%, after 16 weeks from baseline;
[0845] (vii) a mean reduction in BMI Z-Score of between 1-5, e.g., after 16 weeks from baseline;
[0846] (viii) a mean reduction in weight of between about 12-20 kg, e.g., after 16 weeks from baseline;
[0847] (ix) a mean reduction in weight of between about 15-20 kg, e.g., after 16 weeks from baseline;
[0848] (x) a mean reduction in weight of between 5-10 kg, e.g., after 16 weeks from baseline;
[0849] (xi) a mean percentage reduction in weight of between 10-20%, e.g., after 16 weeks from baseline;
[0850] (xii) a mean percentage reduction in weight of between 15-20%, e.g., after 16 weeks from baseline;
[0851] (xiii) a mean percentage reduction in weight of between 5-10%, e.g., after 16 weeks from baseline; and
[0852] (xiv) a mean reduction in the weekly average of the daily most hunger score of between 1-4, e.g., after 16 weeks from baseline.

[0853] 85. The method of embodiment 84, comprising (i).

[0854] 86. The method of embodiment 84, comprising (ii).

[0855] 87. The method of embodiment 84, comprising (iii).

[0856] 88. The method of embodiment 84, comprising (iv).

[0857] 89. The method of embodiment 84, comprising (v).

[0858] 90. The method of embodiment 84, comprising (vi).

[0859] 91. The method of embodiment 84, comprising (vii).

[0860] 92. The method of embodiment 84, comprising (viii).

[0861] 93. The method of embodiment 84, comprising (ix).

[0862] 94. The method of embodiment 84, comprising (x).

[0863] 95. The method of embodiment 84, comprising (xi).

[0864] 96. The method of embodiment 84, comprising (xii).

[0865] 97. The method of embodiment 84, comprising (xiii).

[0866] 98. The method of embodiment 84, comprising (xiv).

[0867] 99. The method of embodiment 84, comprising (i) and (ii).

[0868] 100. The method of embodiment 84, comprising (iv), (vii), (ix), and (xii), wherein the subject is a pediatric subject, e.g., less than 18 years of age.

[0869] 101. The method of embodiment 84, comprising (v), (x), and (xiii), wherein the subject is an adult.

[0870] 102. The method of embodiment 84, wherein the compound is a compound of Formula (I) (e.g., Formula (I-a), Formula (I-b), Formula (I-c), and Formula (I-d).

[0871] 103. The method of embodiment 102, comprising (i).

[0872] 104. The method of embodiment 102, comprising (ii).

[0873] 105. The method of embodiment 102, comprising (iii).

[0874] 106. The method of embodiment 102, comprising (iv).

[0875] 107. The method of embodiment 102, comprising (v).

[0876] 108. The method of embodiment 102, comprising (vi).

[0877] 109. The method of embodiment 102, comprising (vii).

[0878] 110. The method of embodiment 102, comprising (viii).

[0879] 111. The method of embodiment 102, comprising (ix).

[0880] 112. The method of embodiment 102, comprising (x).

[0881] 113. The method of embodiment 102, comprising (xi).

[0882] 114. The method of embodiment 102, comprising (xii).

[0883] 115. The method of embodiment 102, comprising (xiii).

[0884] 116. The method of embodiment 102, comprising (xiv).

[0885] 117. The method of embodiment 102, comprising (i) and (ii).

[0886] 118. The method of embodiment 102, comprising (iv), (vii), (ix), and (xii), wherein the subject is a pediatric subject, e.g., less than 18 years of age.

[0887] 119. The method of embodiment 102, comprising (v), (x), and (xiii), wherein the subject is an adult.

[0888] 120. The method of embodiment 84, wherein the compound is a compound of Formula (I-a).

[0889] 121. The method of compound 120, comprising (i).

[0890] 122. The method of compound 120, comprising (ii).

[0891] 123. The method of compound 120, comprising (iii).

[0892] 124. The method of embodiment 120, comprising (iv).

[0893] 125. The method of embodiment 120, comprising (v).

[0894] 126. The method of embodiment 120, comprising (vi).

[0895] 127. The method of embodiment 120, comprising (vii).

[0896] 128. The method of embodiment 120, comprising (viii).

[0897] 129. The method of embodiment 120, comprising (ix).

[0898] 130. The method of embodiment 120, comprising (x).

[0899] 131. The method of embodiment 120, comprising (xi).

[0900] 132. The method of embodiment 120, comprising (xii).

[0901] 133. The method of embodiment 120, comprising (xiii).

[0902] 134. The method of embodiment 120, comprising (xiv).

[0903] 135. The method of embodiment 120, comprising (i) and (ii).

[0904] 136. The method of embodiment 120, comprising (iv), (vii), (ix), and (xii), wherein the subject is a pediatric subject, e.g., a subject less than 18 years of age.

[0905] 137. The method of embodiment 120, comprising (v), (x), and (xiii), wherein the subject is an adult.

[0906] 138. The method of embodiment 84, wherein the compound is a compound of Formula (I-b).

[0907] 139. The method of compound 138, comprising (i).

[0908] 140. The method of compound 138, comprising (ii).

[0909] 141. The method of compound 138, comprising (iii).

[0910] 142. The method of embodiment 138, comprising (iv).

[0911] 143. The method of embodiment 138, comprising (v).

[0912] 144. The method of embodiment 138, comprising (vi).

[0913] 145. The method of embodiment 138, comprising (vii).

[0914] 146. The method of embodiment 138, comprising (viii).

[0915] 147. The method of embodiment 138, comprising (ix).

[0916] 148. The method of embodiment 138, comprising (x).

[0917] 149. The method of embodiment 138, comprising (xi).

[0918] 150. The method of embodiment 138, comprising (xii).

[0919] 151. The method of embodiment 138, comprising (xiii).

[0920] 152. The method of embodiment 138, comprising (xiv).

[0921] 153. The method of embodiment 138, comprising (i) and (ii).

[0922] 154. The method of embodiment 138, comprising (iv), (vii), (ix), and (xii), wherein the subject is a pediatric patient between 6 to less than 18 years of age.

[0923] 155. The method of embodiment 138, comprising (v), (x), and (xiii), wherein the subject is an adult.

[0924] 156. The method of embodiment 84, wherein the compound is a compound of Formula (I-c).

[0925] 157. The method of compound 156, comprising (i).

[0926] 158. The method of compound 156, comprising (ii).

[0927] 159. The method of compound 156, comprising (iii).

[0928] 160. The method of embodiment 156, comprising (iv).

[0929] 161. The method of embodiment 156, comprising (v).

[0930] 162. The method of embodiment 156, comprising (vi).

[0931] 163. The method of embodiment 156, comprising (vii).

[0932] 164. The method of embodiment 156, comprising (viii).

[0933] 165. The method of embodiment 156, comprising (ix).

[0934] 166. The method of embodiment 156, comprising (x).

[0935] 167. The method of embodiment 156, comprising (xi).

[0936] 168. The method of embodiment 156, comprising (xii).

[0937] 169. The method of embodiment 156, comprising (xiii).

[0938] 170. The method of embodiment 156, comprising (xiv).

[0939] 171. The method of embodiment 156, comprising (i) and (ii).

[0940] 172. The method of embodiment 156, comprising (iv), (vii), (ix), and (xii), wherein the subject is a pediatric patient between 6 to less than 18 years of age.

[0941] 173. The method of embodiment 156, comprising (v), (x), and (xiii), wherein the subject is an adult subject equal to or greater than 18 years of age.

[0942] 174. The method of embodiment 84, wherein the compound is a compound of Formula (I-d).

[0943] 175. The method of compound 174, comprising (i).

[0944] 176. The method of compound 174, comprising (ii).

[0945] 177. The method of compound 174, comprising (iii).

[0946] 178. The method of embodiment 174, comprising (iv).

[0947] 179. The method of embodiment 174, comprising (v).

[0948] 180. The method of embodiment 174, comprising (vi).

[0949] 181. The method of embodiment 174, comprising (vii).

[0950] 182. The method of embodiment 174, comprising (viii).

[0951] 183. The method of embodiment 174, comprising (ix).

[0952] 184. The method of embodiment 174, comprising (x).

[0953] 185. The method of embodiment 174, comprising (xi).

[0954] 186. The method of embodiment 174, comprising (xii).

[0955] 187. The method of embodiment 174, comprising (xiii).

[0956] 188. The method of embodiment 174, comprising (xiv).

[0957] 189. The method of embodiment 174, comprising (i) and (ii).

[0958] 190. The method of embodiment 174, comprising (iv), (vii), (ix), and (xii), wherein the subject is a pediatric patient between 6 to less than 18 years of age.

[0959] 191. The method of embodiment 174, comprising (v), (x), and (xiii), wherein the subject is an adult subject equal to or greater than 18 years of age.

[0960] 192. The method of embodiment 84, wherein the compound is represented by the following structural formula:

(SEQ ID NO: 140)
Arg-c(Cys-D-Ala-Hia-D-Phe-Arg-Trp-Cys)-NH₂

[0961] 193. The method of compound 192, comprising (i).

[0962] 194. The method of compound 192, comprising (ii).

[0963] 195. The method of compound 192, comprising (iii).

[0964] 196. The method of embodiment 192, comprising (iv).

[0965] 197. The method of embodiment 192, comprising (v).

[0966] 198. The method of embodiment 192, comprising (vi).

[0967] 199. The method of embodiment 192, comprising (vii).

[0968] 200. The method of embodiment 192, comprising (viii).

[0969] 201. The method of embodiment 192, comprising (ix).

[0970] 202. The method of embodiment 192, comprising (x).

[0971] 203. The method of embodiment 192, comprising (xi).

[0972] 204. The method of embodiment 192, comprising (xii).

[0973] 205. The method of embodiment 192, comprising (xiii).

[0974] 206. The method of embodiment 192, comprising (xiv).

[0975] 207. The method of embodiment 192, comprising (i) and (ii).

[0976] 208. The method of embodiment 192, comprising (iv), (vii), (ix), and (xii), wherein the subject is a pediatric patient between 6 to less than 18 years of age.

[0977] 209. The method of embodiment 192, comprising (v), (x), and (xiii), wherein the subject is an adult subject equal to or greater than 18 years of age.

[0978] 210. The method of embodiment 84, wherein the compound is a compound of Formula (XII).

[0979] 211. The method of compound 210, comprising (i).

[0980] 212. The method of compound 210, comprising (ii).

[0981] 213. The method of compound 210, comprising (iii).

[0982] 214. The method of embodiment 210, comprising (iv).

[0983] 215. The method of embodiment 210, comprising (v).

[0984] 216. The method of embodiment 210, comprising (vi).

[0985] 217. The method of embodiment 210, comprising (vii).

[0986] 218. The method of embodiment 210, comprising (viii).

[0987] 219. The method of embodiment 210, comprising (ix).

[0988] 220. The method of embodiment 210, comprising (x).

[0989] 221. The method of embodiment 210, comprising (xi).

[0990] 222. The method of embodiment 210, comprising (xii).

[0991] 223. The method of embodiment 210, comprising (xiii).

[0992] 224. The method of embodiment 210, comprising (xiv).

[0993] 225. The method of embodiment 210, comprising (i) and (ii).

[0994] 226. The method of embodiment 210, comprising (iv), (vii), (ix), and (xii), wherein the subject is a pediatric patient between 6 to less than 18 years of age.

[0995] 227. The method of embodiment 210, comprising (v), (x), and (xiii), wherein the subject is an adult subject equal to or greater than 18 years of age.

[0996] 228. The method of embodiment 84, wherein the compound is a compound of Formula (XII-a).

[0997] 229. The method of compound 228, comprising (i).

[0998] 230. The method of compound 228, comprising (ii).

[0999] 231. The method of compound 228, comprising (iii).

[1000] 232. The method of embodiment 228, comprising (iv).

[1001] 233. The method of embodiment 228, comprising (v).

[1002] 234. The method of embodiment 228, comprising (vi).

[1003] 235. The method of embodiment 228, comprising (vii).

[1004] 236. The method of embodiment 228, comprising (viii).

[1005] 237. The method of embodiment 228, comprising (ix).

[1006] 238. The method of embodiment 228, comprising (x).

[1007] 239. The method of embodiment 228, comprising (xi).

[1008] 240. The method of embodiment 228, comprising (xii).

[1009] 241. The method of embodiment 228, comprising (xiii).

[1010] 242. The method of embodiment 228, comprising (xiv).

[1011] 243. The method of embodiment 228, comprising (i) and (ii).

[1012] 244. The method of embodiment 228, comprising (iv), (vii), (ix), and (xii), wherein the subject is a pediatric patient between 6 to less than 18 years of age.

[1013] 245. The method of embodiment 228, comprising (v), (x), and (xiii), wherein the subject is an adult subject equal to or greater than 18 years of age.

[1014] 246. The method of embodiment 84, wherein the compound is a compound of Formula (XII-b).

[1015] 247. The method of compound 246, comprising (i).

[1016] 248. The method of compound 246, comprising (ii).

[1017] 249. The method of compound 246, comprising (iii).

[1018] 250. The method of embodiment 246, comprising (iv).

[1019] 251. The method of embodiment 246, comprising (v).

[1020] 252. The method of embodiment 246, comprising (vi).

[1021] 253. The method of embodiment 246, comprising (vii).

[1022] 254. The method of embodiment 246, comprising (viii).

[1023] 255. The method of embodiment 246, comprising (ix).

[1024] 256. The method of embodiment 246, comprising (x).

[1025] 257. The method of embodiment 246, comprising (xi).

[1026] 258. The method of embodiment 246, comprising (xii).

[1027] 259. The method of embodiment 246 comprising (xiii).

[1028] 260. The method of embodiment 246, comprising (xiv).

[1029] 261. The method of embodiment 246, comprising (i) and (ii).

[1030] 262. The method of embodiment 246, comprising (iv), (vii), (ix), and (xii), wherein the subject is a pediatric patient between 6 to less than 18 years of age.

[1031] 263. The method of embodiment 246, comprising (v), (x), and (xiii), wherein the subject is an adult subject equal to or greater than 18 years of age.

[1032] 264. The method of embodiment 84, wherein the compound is a compound of Formula (XII-c).

[1033] 265. The method of compound 264, comprising (i).

[1034] 266. The method of compound 264, comprising (ii).

[1035] 267. The method of compound 264, comprising (iii).

[1036] 268. The method of embodiment 264, comprising (iv).

[1037] 269. The method of embodiment 264, comprising (v).

[1038] 270. The method of embodiment 264, comprising (vi).

[1039] 271. The method of embodiment 264, comprising (vii).

[1040] 272. The method of embodiment 264, comprising (viii).

[1041] 273. The method of embodiment 264, comprising (ix).

[1042] 274. The method of embodiment 264, comprising (x).

[1043] 275. The method of embodiment 264, comprising (xi).

[1044] 276. The method of embodiment 264, comprising (xii).

[1045] 277. The method of embodiment 264 comprising (xiii).

[1046] 278. The method of embodiment 264, comprising (xiv).

[1047] 279. The method of embodiment 264, comprising (i) and (ii).

[1048] 280. The method of embodiment 264, comprising (iv), (vii), (ix), and (xii), wherein the subject is a pediatric patient between 6 to less than 18 years of age.

[1049] 281. The method of embodiment 264, comprising (v), (x), and (xiii), wherein the subject is an adult subject equal to or greater than 18 years of age.

[1050] 282. The method of embodiment 84, wherein the compound is a compound of Formula (XII-d).

[1051] 283. The method of compound 282, comprising (i).

[1052] 284. The method of compound 282, comprising (ii).

[1053] 285. The method of compound 282, comprising (iii).

[1054] 286. The method of embodiment 282, comprising (iv).

[1055] 287. The method of embodiment 282, comprising (v).

[1056] 288. The method of embodiment 282, comprising (vi).

[1057] 289. The method of embodiment 282, comprising (vii).

[1058] 290. The method of embodiment 282, comprising (viii).

[1059] 291. The method of embodiment 282, comprising (ix).

[1060] 292. The method of embodiment 282, comprising (x).

[1061] 293. The method of embodiment 282, comprising (xi).

[1062] 294. The method of embodiment 282, comprising (xii).

[1063] 295. The method of embodiment 282, comprising (xiii).

[1064] 296. The method of embodiment 282, comprising (xiv).

[1065] 297. The method of embodiment 282, comprising (i) and (ii).

[1066] 298. The method of embodiment 282, comprising (iv), (vii), (ix), and (xii), wherein the subject is a pediatric patient between 6 to less than 18 years of age.

[1067] 299. The method of embodiment 282, comprising (v), (x), and (xiii), wherein the subject is an adult subject equal to or greater than 18 years of age.

[1068] 300. The method of embodiment 84, wherein the compound is represented by the structural formula:

(SEQ ID NO: 632)
Ac-Arg-c(hCys-Thr-D-Phe-Arg-Trp-Pen)-NH₂

[1069] 301. The method of compound 300, comprising (i).

[1070] 302. The method of compound 300, comprising (ii).

[1071] 303. The method of compound 300, comprising (iii).

[1072] 304. The method of embodiment 300, comprising (iv).

[1073] 305. The method of embodiment 300, comprising (v).

[1074] 306. The method of embodiment 300, comprising (vi).

[1075] 307. The method of embodiment 300, comprising (vii).

[1076] 308. The method of embodiment 300, comprising (viii).

[1077] 309. The method of embodiment 300, comprising (ix).

[1078] 310. The method of embodiment 300, comprising (x).

[1079] 311. The method of embodiment 300, comprising (xi).

[1080] 312. The method of embodiment 300, comprising (xii).

[1081] 313. The method of embodiment 300, comprising (xiii).

[1082] 314. The method of embodiment 300, comprising (xiv).

[1083] 315. The method of embodiment 300, comprising (i) and (ii).

[1084] 316. The method of embodiment 300, comprising (iv), (vii), (ix), and (xii), wherein the subject is a pediatric patient between 6 to less than 18 years of age.

[1085] 317. The method of embodiment 300, comprising (v), (x), and (xiii), wherein the subject is an adult subject equal to or greater than 18 years of age.

### EXAMPLES

### Example 1: An Open-Label Study to Evaluate the Safety and Efficacy of an Exemplary MC4R Agonist in Subjects with Hypothalamic Obesity

### Purpose

[1086] This example describes a phase 2 study that seeks to evaluate the change in body weight in response to an exemplary MC4R agonist, e.g., setmelanotide (i.e., SEQ ID NO: 140) administered subcutaneously (SC) daily in patients with hypothalamic obesity (HO).

[1087] Additional objectives of this study include evaluation of changes in parameters of body weight, body mass index (BMI), waist circumference, and hunger in response to setmelanotide in patients with HO and to evaluate the safety and tolerability of setmelanotide in patients with HO. In addition, this study seeks to evaluate changes in weight and BMI in patients of different age groups and changes in metabolic parameters following treatment with setmelanotide.

### Investigational Study Drug

[1088] Setmelanotide, 10 mg/mL in a sterile solution for injection, was provided at 1.0, 2.0, 3.0 mg QD for patients 6 to <16 years of age, and 2.0 to 3.0 mg QD for patients ≥16 years of age.

### Primary Endpoints

[1089] The primary endpoint of this study was to identify a proportion of patients with ≥5% reduction from baseline in BMI after 16 weeks of setmelanotide treatment compared to a historic control of <5% in this patient population.

### Secondary Endpoints

[1090] The secondary endpoints included determination of:
[1091] Composite proportion of patients aged ≥6 to <18 years with ≥0.2 reduction of BMI Z-score and patients aged ≥18 years with 5% reduction of body weight from baseline after 16 weeks of setmelanotide
[1092] Proportion of patients aged ≥6 to <18 years with ≥0.2 reduction of BMI Z-score from baseline after 16 weeks of setmelanotide
[1093] Proportion of patients aged 18 years with 5% reduction of body weight from baseline after 16 weeks of setmelanotide
[1094] Change from baseline in waist circumference in patients aged 18 years after 16 weeks of setmelanotide treatment.
[1095] Change in hunger in response to 16 weeks of setmelanotide treatment as measured by change from baseline in daily and global hunger scores.
[1096] Safety and tolerability assessed by the frequency and severity of AEs, vital signs, and laboratory evaluations.
[1097] Change from baseline in metabolic parameters following treatment with setmelanotide, including fasting glucose, HbA1c, lipid profiles (total-, high-density lipoprotein [HDL]-, and low-density lipoprotein [LDL]-cholesterol, triglycerides).
[1098] Proportion of patients, regardless of age, with ≥5% body weight loss from baseline after 16 weeks of setmelanotide treatment compared to a historic control of <5% in this patient population.
[1099] Change from baseline in BMI, weight, and waist circumference, regardless of age, after 16 weeks of setmelanotide treatment.
[1100] Change from baseline in BMI Z-score in patients aged 6 to 12 years and in those aged 6 to <18 years.

### Study Design Rationale

[1101] This study describes a Phase 2, multicenter, open-label, proof of concept study designed to assess the effect of setmelanotide on weight loss within a population affected by HO. Approximately 15 patients aged 6 to 40 years, inclusive, were enrolled across approximately 3-5 clinical sites in the United States (US). Setmelanotide was evaluated as a potential treatment for obesity in rare mechanistically induced populations with hypothalamic injury and subsequent obesity. The open-label design was supported by the compelling efficacy results from earlier pivotal studies in patients with POMC and LEPR deficiency obesity that demonstrate that setmelanotide induces rapid and sustained significant and clinically meaningful weight loss accompanied by statistically significant and clinically meaningful reduction in hunger in these patient populations.

### Screening Period

[1102] Upon providing informed consent, patients entered the Screening Period, during which they were assessed for eligibility and complete all screening procedures.

### Treatment Period

[1103] Patients who were determined to be eligible, based on Screening assessments, returned to the clinic for the Baseline Visit (Visit 2) and received the first setmelanotide dose. The starting setmelanotide dose was dependent on patient age; however, for all patients, the setmelanotide dose was titrated to a final dose of 3.0 mg/day (initial titration phase), as follows

### Patients Aged 6 to <16 Years, Inclusive

[1104] Starting at Baseline (Day 1; Visit 2) through approximately Day 14, patients received setmelanotide 1.0 mg/day.
[1105] Starting at approximately Day 15 through 28, patients received setmelanotide 2.0 mg/day.

[1106] Patients/caregivers were contacted by study center personnel on Day 15 to ensure dose titration occurred and to document any AEs.
[1107] Starting on approximately Day 29 (Visit 3), patients received setmelanotide 3.0 mg/day; patients continued to receive setmelanotide 3.0 mg/day for 12 weeks.

### Patients Aged ≥16 Years, Inclusive

[1108] Starting at Baseline (Day 1; Visit 2) through approximately Day 14, patients received setmelanotide 2.0 mg/day.
[1109] Starting at approximately Day 15, patients received setmelanotide 3.0 mg/day; patients continue to receive setmelanotide 3.0 mg/day for 14 weeks.

[1110] Patients/caregivers were contacted by study center personnel on Day 15 to ensure dose titration occurred and to document any adverse events.

[1111] Patients returned to the study center for Visits 3, 4, and 5 (Weeks 4, 8, and 12, respectively), with each of these visits conducted approximately 4 weeks apart. All patients returned to the study center at Week 16 (Visit 6) and received the last setmelanotide injection. Study endpoints were analyzed at Visit 6. After completion of Visit 6, participation in the current study then concluded in one of the following 2 ways:
[1112] Patients meeting the primary endpoint were eligible to be enrolled in a separate extension study under which auspices the patient continued to receive setmelanotide.
[1113] Patients who did not meet the primary endpoint or elected not to continue setmelanotide discontinued setmelanotide at Visit 6 and return for an End-of-Study (EOS) Visit (Visit 7) 4 weeks thereafter for a final safety review under the auspices of the current study

### Inclusion Criteria

[1114] Patients met the following criteria to be eligible for study participation:

[1115] 1. Patient has documented evidence of HO, including:
[1116] a. Recent (within the previous 8 months before Screening) evidence of hypothalamic injury on magnetic resonance imaging (MRI); and
[1117] b. Diagnosis of craniopharyngioma or other non-malignant brain tumor affecting the hypothalamic region; and
[1118] c. Has undergone surgery, or chemotherapy, or radiation ≥6 months and ≤15 years before screening.

[1119] 2. Patient has either unilateral hypothalamic lesions (at least 6 patients) or bilateral hypothalamic lesions (at least 7 patients), as assessed by MRI.

[1120] 3. Aged 6 to 40 years, inclusive, at time of enrollment.

[1121] 4. Obesity, documented by a BMI≥35 kg/m2 for patients ≥18 years of age or BMI ≥95th percentile for age and gender for patients 6 to <18 years of age based on the US Centers for Disease Control and Prevention criteria.

[1122] 5. Documented increase in BMI (change from pre-surgery baseline in BMI Z-score ≥0.2 for patients <18 years of age or BMI >5% for patients 18 years of age) either during the first 6 months following surgery or within 1 year before surgery and still present at Screening.

[1123] 6. More than 6 months after the end of post-tumor treatment, including chemotherapy, surgery, or radiation.

[1124] 7. Patient mett one of the following contraception requirements:
[1125] If a female of childbearing potential, defined as fertile, following menarche and until becoming post-menopausal unless permanently sterile (hysterectomy, bilateral salpingectomy, or bilateral oophorectomy), must use a highly effective form of contraception.
[1126] If a female of non-childbearing potential, defined as permanently sterile (status post hysterectomy, bilateral oophorectomy, or bilateral salpingectomy) or post-menopausal for at least 12 months (and confirmed with a screening follicle-stimulating hormone [FSH] level in the post-menopausal laboratory range), contraception is not required during the study.
[1127] Younger female patients who have not reached menarche upon study entry will be assessed for Tanner staging and at first menarche will be required to comply with contraception requirements and pregnancy testing as outlined in the protocol.
[1128] If a male with female partner(s) of childbearing potential, must agree to a double barrier method if they become sexually active during the study. Furthermore, male patients must not donate sperm during and for 90 days following their participation in the study.

[1129] 8. Ability to communicate well with the Investigator, understand and comply with the requirements of the study, and understand and sign the written informed consent, or, for patients aged <18 years, a parent/legal guardian that can sign.

[1130] 9. If receiving hormone replacement therapy (ie, thyroid hormones, glucocorticoids, growth hormone or other medications known to affect metabolism or weight/body composition), the dose of such therapy has remained stable for at least 2 months prior to Screening.

### Exclusion Criteria

[1131] Patients meeting any of the following criteria were not eligible for study participation:

[1132] 1. Weight gain >5% in the previous 3 months.

[1133] 2. Weight loss ≥2% in the previous 3 months.

[1134] Note: Dietary and/or exercise regimens, with or without the use of medications, supplements or herbal treatments associated with weight loss (eg, orlistat, lorcaserin, phentermine, topiramate, naltrexone, bupropion, glucagon-like peptide-1 [GLP-1] receptor agonists, etc.) were allowed if:
[1135] the regimen and/or dose has been stable for at least 3 months prior to randomization
[1136] the patient has not experienced weight loss ≥2% during the previous 3 months, and
[1137] the patient intends to keep the regimen and/or dose stable throughout the course of the study.

[1138] 3. Bariatric surgery or procedure (eg, gastric bypass/band/sleeve, duodenal switch, gastric balloon, intestinal barrier, etc) within the last 6 months. All patients with a history of bariatric surgery or procedures must be discussed with and receive approval from the Sponsor prior to enrollment.

[1139] 4. Diagnosis of severe psychiatric disorders (eg, schizophrenia, bipolar disorder, personality disorder), or Major Depressive Disorder (MDD) within the previous 2 years, or Screening Patient Health Questionnaire (PHQ)-9/PHQ-A score ≥15, or any suicidal ideation of type 4 or 5 on the Columbia-Suicide Severity Rating Scale (C—SSRS) during Screening, or lifetime history of suicide attempts, or any suicidal behavior in the last month.

[1140] 5. Glycated hemoglobin (HbA1c) >10.0% at Screening.

[1141] 6. Current, clinically significant pulmonary, cardiac, or oncologic disease considered severe enough to interfere with the study and/or confound the results. Any patient with a potentially clinically significant disease should be reviewed with the Sponsor to determine eligibility.

[1142] 7. Glomerular filtration rate (GFR)<30 mL/min/1.73 m2 during Screening.

[1143] 8. Significant dermatologic findings relating to melanoma or pre-melanoma skin lesions (excluding non-invasive basal or squamous cell lesion), determined as part of a comprehensive skin evaluation performed by the Investigator during Screening. Any concerning lesions identified during Screening will be biopsied and results known to be benign prior to enrollment. If the pre-treatment biopsy results are of significant concern, the patient is not eligible for study participation.

[1144] 9. History or close family history (parents or siblings) of skin cancer or melanoma (not including noninvasive, infiltrative basal or squamous cell lesion), or patient history of ocular-cutaneous albinism.

[1145] 10. Participation in any clinical study with an investigational drug/device within 3 months or 5 half-lives, whichever is longer, prior to the first setmelanotide dose.

[1146] 11. Previously enrolled in a clinical study involving setmelanotide or any previous exposure to setmelanotide.

[1147] 12. Inability to comply with once daily (QD) injection regimen.

[1148] 13. Pregnant and/or breastfeeding or desiring to become pregnant during this trial.

[1149] 14. Cognitive impairment that, in the Investigator's opinion, precludes participation to the study and completions of study procedures or questionnaires.

[1150] 15. Patient is, in Investigator's opinion, otherwise not suitable to participate in the study.

### Duration of Treatment

[1151] All patients received study treatment for 16 weeks. Total study participation lasted between 22 and 28 weeks, based on the variable length of the Screening Period

### Treatment

[1152] All patients received open-label setmelanotide in this study. Setmelanotide was provided as a preserved, multidose solution for injection to be administered SC, QD. It was formulated as a 10 mg/mL sterile, preserved, clear to slightly opalescent, colorless to slightly colored solution, practically free of visible particles. The drug product solution (1 mL) was presented in a clear 2R glass vial with a rubber stopper. Packaging and labeling met all regulatory requirements. Setmelanotide was administered as SC injection QD.

[1153] All patients received setmelanotide in this study. The starting setmelanotide dose was dependent on patient age at the time of Visit 2 (Day 1); however, for all patients, the setmelanotide dose was titrated to a final dose of 3.0 mg/day (initial titration phase), as follows:

### Patients Aged 6 to <16 Years

[1154] Starting at Baseline (Day 1; Visit 2) through approximately Day 14, patients received setmelanotide 1.0 mg/day

[1155] Starting at approximately Day 15 through 28, patients received setmelanotide 2.0 mg/day.
[1156] Patients/caregivers were contacted by study center personnel on Day 15 to ensure dose titration occurred and to document any adverse events.
[1157] Starting on approximately Day 29 (Visit 3), patients received setmelanotide 3.0 mg/day; patients continued to receive setmelanotide 3.0 mg/day for 12 weeks.

### Patients Aged ≥16 Years

[1158] Starting at Baseline (Day 1; Visit 2) through approximately Day 14, patients received setmelanotide 2.0 mg/day.
[1159] Starting at approximately Day 15, patients received setmelanotide 3.0 mg/day; patients continued to receive setmelanotide 3.0 mg/day for 14 weeks.

### Patient Assessments

[1160] All screening evaluations were completed and reviewed to confirm that potential patients meet all eligibility criteria. Exemplary evaluations included a medical history review, physical examination, comprehensive skin examination, measurement of height, weight, waist circumference, body composition assessment, pregnancy test (if applicable), daily hunger questionnaires, global hunger assessment, and evaluation of PHQ-A or PHQ-9, C—SSRS, SF-12 or SF-10, IWQOL, FSH, HbA1c, and fasting lipid panel. Adjustments were made depending upon specific circumstances and in consultation with the investigator. Immediate safety concerns were discussed immediately upon occurrence or awareness to determine if the patient should continue or discontinue study treatment.

### Results

[1161] The results of the study showed that all patients achieved the primary endpoints of the study at 16 weeks on setmelanotide. Of the full analysis set (FAS) population (n=11), 100% of patients achieved the primary endpoint of greater than or equal to 5% reduction in BMI (p<0.0001). Of the completers (n=9), 100% of patients achieved at least a 10% reduction in BMI (p<0.0001). Further, setmelanotide treatment resulted in mean BMI reduction of −19.5% in 9 completers at 16 weeks, which translates to a −17.8% mean percent change in body weight after 16 weeks of setmelanotide (SD, 7.9%). Setmelanotide treatment resulted in statistically significant reduction in BMI Z score in all patients less than 18 years old. For the FAS set, this resulted in a −1.1 point mean change in BMI Z score after 16 weeks of setmelanotide treatment. The safety and tolerability of setmelanotide treatment was consistent with established data.

[1162] In addition to the reduction in BMI and BMI Z-Score across the full analysis set (FAS), there was a statistically significant and clinically meaningful reduction in weight for both pediatric and adult patients after 16 weeks of daily SC setmelanotide therapy as shown in Table 3 below.

TABLE 3
Summary of Weight (kg) Change from Baseline to 16 Weeks of Treatment by Age

| | | | 6-<18 years | | ≥18 years | | Total | |
|---|---|---|---|---|---|---|---|---|
| Visit | Parameter | Statistic | (N = 9) | | (N = 2) | | (N = 11) | |
| Baseline | Actual | N | 9 | | 2 | | 11 | |
| | | Mean (SD) | 107.81 | (29.91) | 103.80 | (3.68) | 107.08 | (26.83) |
| | | 90% CI | 89.27, 126.36 | | 87.38, 120.22 | | 92.42, 121.75 | |
| | | Median | 119.23 | | 103.80 | | 110.40 | |
| | | Min, Max | 39.0, 141.4 | | 101.2, 106.4 | | 39.0, 141.4 | |
| Week 16 | Actual | N | 9 | | 2 | | 11 | |
| | | Mean (SD) | 89.98 | (27.71) | 96.78 | (3.56) | 91.22 | (24.96) |
| | | 90% CI | 72.80, 107.16 | | 80.89, 112.67 | | 77.58, 104.86 | |
| | | Median | 93.07 | | 96.78 | | 94.27 | |
| | | Min, Max | 25.4, 124.6 | | 94.3, 99.3 | | 25.4, 124.6 | |
| | Change from | N | 9 | | 2 | | 11 | |
| | Baseline | Mean (SD) | −17.83 | (6.37) | −7.02 | (0.12) | −15.87 | (7.18) |
| | | 90% CI | −21.78, −13.89 | | −7.54, −6.49 | | −19.79, −11.94 | |
| | | Median | −16.77 | | −7.02 | | −13.90 | |
| | | Min, Max | −28.2, −9.5 | | −7.1, −6.9 | | −28.2, −6.9 | |
| | Percent | N | 9 | | 2 | | 11 | |
| | Change from | Mean (SD) | −17.80 | (7.93) | −6.76 | (0.13) | −15.79 | (8.38) |

| | | | | |
|---|---|---|---|---|
| Baseline | 90% CI | −22.71, −12.89 | −7.32, −6.20 | −20.37, −11.21 |
| | Median | −14.12 | −6.76 | −13.68 |
| | Min, Max | −34.9, −10.7 | −6.9, −6.7 | −34.9, −6.7 |

[1163] The daily hunger questionnaire as assessed in patients ≥12 years of age also achieved a clinically meaningful diminution quantifying the most hungry the patient has experienced over the last 24 hours, with a mean reduction in the hunger score of −2.66 after 16 weeks. This outcome exceeded what is typically established as a clinically meaningful change for patients having a genetic defect in the MC4R pathway of 1-2 points, as shown in Table 4 below.

TABLE 4
Summary of Change from Baseline to Week 16 in the Weekly Average
of the Daily Most Hunger Scores in Patients ≥12 years of Age

| | Visit | Parameter | Statistic | Total (N = 8) |
|---|---|---|---|---|
| Most Hungry | Baseline | Actual | N | 8 |
| Last 24 hrs | | | Mean (SD) | 7.18 (1.17) |
| | | | 90% CI | 6.40, 7.96 |
| | | | Median | 7.1 |
| | | | Min, Max | 5.4, 8.7 |
| | Week 16 | Actual | N | 7 |
| | | | Mean (SD) | 4.55 (2.84) |
| | | | 90% CI | 2.47, 6.63 |
| | | | Median | 5.67 |
| | | | Min, Max | 1.0, 7.6 |
| | | Change from | N | 7 |
| | | Baseline | Mean (SD) | −2.66 (2.64) |
| | | | 90% CI | −4.60, −0.72 |
| | | | Median | −1.71 |
| | | | Min, Max | −7.0, 0.4 |

[1164] Treatment Emergent Adverse Events (TEAEs) and Serious Adverse Events (SAEs) All eleven of the patients experienced at least one form of treatment emergent adverse event (TEAE), either related to administration or unrelated to administration. The most commonly reported TEAE was nausea (63.6%). Skin hyperpigmentation, e.g., the development of a melanocytic naevus, was only reported in two of the eleven patients. A SAE related to Clostridium dificile colitis was classified as severe, but not related to setmelanotide therapy, and the patient was able to complete the study.

### Example 2: Long-Term Extension Study

### Purpose

[1165] This example describes a long-term extension study of the use of setmelanotide in treating hypothalamic obesity, and further to investigate the safety and tolerability of chronic setmelanotide administration for up to 5 years from initiation of treatment. Patients had the option to gain entry into the long-term extension study immediately after completion of a prior setmelanotide trial, having demonstrated satisfactory therapeutic efficacy and safety criteria to ensure there is no cessation in setmelanotide therapy.

### Investigational Study Drug

[1166] Setmelanotide, 10 mg/mL in a sterile solution, QD. Dosing was continued at the dosage of the cessation of the previous setmelanotide trial, (e.g., 3.0 mg QD for most patients enrolled in the setmelanotide trial for treating subjects with hypothalamic obesity), unless a change is determined necessary by the Investigator, e.g., for safety, tolerability, TEAE, SAE, or other concern.

### Primary Endpoint

[1167] The objective of this study was to examine the long-term safety parameters of chronic, daily subcutaneous setmelanotide injections for a period of up to 5 years. In order to assess this primary endpoint, the occurrence of TEAEs and SAEs were tracked, in addition to other clinical data including any new emergence of injection site reactions, changes in resting heart rate or blood pressure, laboratory workup (e.g., fasting glucose, HbA1c, lipid profiles (total-, high-density lipoprotein [HDL]-, and low-density lipoprotein [LDL]-cholesterol, triglycerides), liver enzymes, changes in physical examination (e.g., weight, BMI, BMI Z-Score), and cardiac changes (e.g., as measured by an electrocardiogram (ECG).

### Study Design Rational

[1168] This study was a long-term, multi-center, open-label extension of several Phase 2 and 3 setmelanotide trials designed to investigate the safety and tolerability profile of chronic, daily SC setmelanotide administration for up to 5 years. All patients ≥2 years of age who previously participated in another setmelanotide clinical trial and have met efficacy and safety criteria were eligible to participate. Setmelanotide was being evaluated as a potential treatment for obesity caused by a myriad of etiologies, such as genetic and acquired defects in the MC4 receptor pathway. Previous trials have demonstrated that setmelanotide is useful in rapidly inducing weight loss and perception of hunger in subjects carrying mutations in the POMC and LEPR genes located upstream of the MC4 receptor. Both weight loss and daily hunger scores were sustained and statistically significant and clinically meaningful over the course of the trial. Acquired defects encompass, e.g., hypothalamic obesity.

### Treatment Period

[1169] All patients ≥2 years of age who have enrolled in a previous setmelanotide trial (e.g., the open-label study to evaluate the safety and efficacy of setmelanotide in subjects with hypothalamic obesity) and achieved therapeutic efficacy and safety criteria consistent with continuation of setmelanotide treatment as assessed by the Investigator are eligible to continue with their current setmelanotide treatment regimens for up to a 5-year duration of the study period.

### Eligibility Criteria

[1170] Patients met the following criteria to be eligible for study participation:

[1171] 1. Patients ≥2 years of age who have enrolled in a previous setmelanotide trial (e.g., the open-label study to evaluate the safety and efficacy of setmelanotide in subjects with hypothalamic obesity) and achieved therapeutic efficacy and safety criteria as determined by the Investigator.

[1172] 2. Ability to communicate well with the Investigator, understand and comply with the requirements of the study, and understand and sign the written informed consent, or, for patients aged <18 years, a parent/legal guardian that can sign.

[1173] 3. Patient must meet one of the following contraception requirements:
[1174] If a female of childbearing potential, defined as fertile, following menarche and until becoming post-menopausal unless permanently sterile (hysterectomy, bilateral salpingectomy, or bilateral oophorectomy), must use a highly effective form of contraception.
[1175] If a female of non-childbearing potential, defined as permanently sterile (status post hysterectomy, bilateral oophorectomy, or bilateral salpingectomy) or post-menopausal for at least 12 months (and confirmed with a screening follicle-stimulating hormone [FSH] level in the post-menopausal laboratory range), contraception is not required during the study.
[1176] Younger female patients who have not reached menarche upon study entry will be assessed for Tanner staging and at first menarche will be required to comply with contraception requirements and pregnancy testing as outlined in the protocol.
[1177] If a male with female partner(s) of childbearing potential, must agree to a double barrier method if they become sexually active during the study. Furthermore, male patients must not donate sperm during and for 90 days following their participation in the study.

### Exclusion Criteria

[1178] 1. Pregnant and/or breastfeeding or desiring to become pregnant during this trial.

[1179] 2. Significant dermatologic findings relating to melanoma or pre-melanoma skin lesions (excluding non-invasive basal or squamous cell lesion), determined as part of a comprehensive skin evaluation performed by the Investigator during Screening. Any concerning lesions identified during Screening will be biopsied and results known to be benign prior to enrollment. If the pre-treatment biopsy results are of significant concern, the patient is not eligible for study participation.

[1180] 3. Current, clinically significant pulmonary, cardiac, or oncologic disease considered severe enough to interfere with the study and/or confound the results. Any patient with a potentially clinically significant disease should be reviewed with the Sponsor to determine eligibility.

[1181] 4. Diagnosis of severe psychiatric disorders (e.g., schizophrenia, bipolar disorder, personality disorder or Major Depressive Disorder (MDD). 5. Any suicidal ideation of type 4 or 5 on the Columbia-Suicide Severity Rating Scale (C—SSRS) during Screening, or lifetime history of suicide attempts, or any suicidal behavior in the last month.

[1182] 6. Current or prior diagnosis of a significant liver disease

[1183] 7. Glomerular filtration rate (GFR)<30 mL/min during Screening.

[1184] 8. History or close family history (parents or siblings) of skin cancer or melanoma (not including noninvasive, infiltrative basal or squamous cell lesion), or patient history of ocular-cutaneous albinism.

### Results for the HO Subpopulation of Patients

[1185] 5 patients from the Phase 2 study of setmelanotide for treating subjects with hypothalamic obesity continued treatment with setmelanotide in the long-term extension study. All of the patients achieved significant reductions in BMI during the initial Phase 2 study, and all of the patients but one continued to further see reductions in BMI for an additional 3-8 months. The fifth patient who experienced an increase in BMI in the long-term extension study period, however, did not return to his or her original BMI at the initiation of the Phase 2 study.

### Example 3: a Study to Evaluate the Safety and Efficacy of Setmelanotide in Subjects with Hypothalamic Obesity

### Purpose

[1186] This example describes a phase 3 study that seeks to evaluate the change in body mass index in response to setmelanotide administered subcutaneously (SC) daily in patients with hypothalamic obesity (HO). Additional objectives of this study include evaluation of changes in parameters of body weight, body mass index (BMI), waist circumference, and quality of life in response to setmelanotide in patients with HO and to evaluate the safety and tolerability of setmelanotide in patients with HO. In addition, this study seeks to evaluate changes in weight, BMI, hunger, waist circumference, hyperphagia, hunger, and quality of life in patients that were being administered setmelanotide for a total of 12 months and in patients being administered setmelanotide for only 6 months at the end of the open label part (6 months).

### Investigational Study Drug

[1187] Setmelanotide, 10 mg/mL in a sterile solution for injection, will be provided at 1.0, 2.0, 3.0 mg QD for patients 6 to <16 years of age, and 2.0 to 3.0 mg QD for patients ≥16 years of age.

### Primary Endpoints

[1188] The primary endpoint of this study is to evaluate the % change in BMI in response to setmelanotide administered subcutaneously (SC) daily in patients with hypothalamic obesity (HO) compared to placebo at the end of placebo-controlled study.

### Secondary Endpoints

[1189] The secondary endpoints include evaluation of:
[1190] changes in parameters of body weight, waist circumference, and quality of life in response to setmelanotide in patients with HO at the end of the 6-month placebo-controlled study
[1191] changes in physical activity and sleep in patients with HO compared to placebo at the end of the 6-month placebo-controlled study
[1192] changes in parameters of body weight, waist circumference, hunger, hyperphagia and quality of life in response to setmelanotide in patients that were on setmelanotide a total of 12 months and on patients that were on setmelanotide only 6 months at the end of the open label part (12 months)
[1193] changes in physical activity and sleep in patients that were on setmelanotide a total of 12 months and on patients that were on setmelanotide only 6 months at the end of the open label part (12 months)
[1194] change in metabolic parameters following treatment with setmelanotide compared to placebo at the end of the 6-month placebo-controlled part.
[1195] change in metabolic parameters following treatment with setmelanotide in patients that were on setmelanotide a total of 12 months and on patients that were on setmelanotide only 6 months at the end of the open label part (12 months).
[1196] change in biomarkers following treatment with setmelanotide compared to placebo at the end of the 6-month placebo-controlled part low-density lipoprotein [LDL]-cholesterol, triglycerides).
[1197] change in biomarkers following treatment with setmelanotide in patients that were on setmelanotide a total of 12 months and on patients that were on setmelanotide only 6 months at the end of the open label part (12 months).

### Study Design Rationale

[1198] This study describes a Phase 3, multicenter, placebo-controlled, randomized 2:1 (active to placebo), single registrational study, designed to assess the effect of setmelanotide on weight loss and hunger on a population affected by HO (Stage A) followed by a 6-month open label part to assess efficacy and tolerability of setmelanotide at 1 year of treatment (Stage B). Approximately 120 patients aged 4 and over are planned to be enrolled across approximately 20-25 clinical sites in the US and Europe.

### Screening Period

[1199] Upon providing informed consent, patients will enter the Screening Period, during which they will be assessed for eligibility and complete all screening procedures as described in the Schedule of Activities (SoA). During the screening period patients will be asked to provide at least 3 documented data points on height for pediatric patients, and weight deriving from at least 6 months before the day of screening.

### Treatment Period

[1200] Patients who are determined to be eligible, based on Screening assessments, will return to the clinic for the Baseline Visit (Visit 2) and receive the first setmelanotide dose. The starting setmelanotide dose is dependent on patient age; however, for all patients, the setmelanotide dose will be titrated to a final dose of 3.0 mg/day (initial titration phase), as follows

### Patients Aged 4 and Older

[1201] Starting at Baseline (Day 1; Visit 2) through approximately Day 14, patients will receive setmelanotide 0.5 mg/day.
[1202] Patients will be escalated every 1 week (minimum) or 2 weeks (maximum) of 0.5 mg to 1 mg depending on tolerability with the goal of reaching 3 mg by Visit 5 (week 12)
[1203] On Visit 5 (or earlier when tolerated), patients will be started on 3 mg until week 24 (Visit 8).

[1204] The investigator, after conversation with the Sponsor may vary dose regimen based on tolerability and efficacy considerations.

### Study Visits

[1205] Patients will return to the study center for Visits 3, 4, 5, 6, 7, 8 (Weeks 4, 8, and 12, 16, 20, 24 respectively), with each of these visits conducted approximately 4 weeks apart. All patients will return to the study center at Week 24 (Visit 8) and receive the last setmelanotide or placebo injection of the placebo-controlled portion. Study endpoints are collected at Visit 8. After completion of Visit 8, participation in the current study will then proceed with 6 months open label part (Stage B).

[1206] Every patient transitioning into Stage B will follow the same escalation scheme of Stage A regardless of the treatment assignment. Patients and site staff will remain blinded to treatment assignment throughout the study.

### Inclusion Criteria

[1207] Patients must meet the following criteria to be eligible for study participation:

[1208] 1. Patient has documented evidence of HO so defined:
[1209] a) Evidence of hypothalamic injury on magnetic resonance imaging (MRI); AND
[1210] b) Diagnosis of craniopharyngioma or other non-malignant brain tumor affecting the hypothalamic region;
[1211] c) Has undergone surgery, or chemotherapy, or radiation ≥6 months before Screening.
[1212] d) the investigator has acknowledged weight gain associated with the hypothalamic injury for 1 year before surgery or chemotherapy or radiotherapy and/or 6 months afterwards

[1213] 2. Aged 4 and over at time of enrollment.

[1214] 3. Obesity, documented by a BMI ≥30 kg/m² for patients ≥18 years of age or BMI ≥93rd percentile for age and gender for patients 6 to <18 years of age based on the US Centers for Disease Control and Prevention criteria.

[1215] 4. Patients or caregivers reporting temporally related increase in hunger and/or hyperphagia to tumor diagnosis or treatment for it and still present at screening.

[1216] 5. Patient must meet one of the following contraception requirements:
[1217] If a female of childbearing potential, defined as fertile, following menarche and until becoming post-menopausal unless permanently sterile (hysterectomy, bilateral salpingectomy, or bilateral oophorectomy), must use a highly effective form of contraception and for 90 days after the study as outlined in Section Error! Reference source not found.
[1218] If a female of non-childbearing potential, defined as permanently sterile (status post hysterectomy, bilateral oophorectomy, or bilateral salpingectomy) or post-menopausal for at least 2 months (and confirmed with a screening follicle-stimulating hormone [FSH] level in the post-menopausal laboratory range), contraception is not required during the study.
[1219] Younger female patients who have not reached menarche upon study entry will be assessed for Tanner staging and at first menarche will be required to comply with contraception requirements and pregnancy testing as outlined in the protocol.
[1220] If a male with female partner(s) of childbearing potential, must agree to a double barrier method if they become sexually active during the study. Furthermore, male patients must not donate sperm during and for 90 days following their participation in the study.

[1221] 6. Ability to communicate well with the Investigator, understand and comply with the requirements of the study, and understand and sign the written informed consent, or, for patients aged <18 years, a parent/legal guardian that can sign.

[1222] 7. If receiving hormone replacement therapy (i.e., thyroid hormones, glucocorticoids, growth hormone or other medications known to affect metabolism or weight/body composition), the dose of such therapy has remained stable for at least 2 months prior to Screening. (Changes in dose of ≤15% may be permissible, with the Sponsor's approval.)

### Exclusion Criteria

[1223] Patients meeting any of the following criteria are not eligible for study participation:

[1224] 1. Weight loss ≥2% in the previous 3 months for patients ≥18 years of age or >2% reduction in BMI for pediatric patients aged 4 to <18 years of age.

[1225] Note: Dietary and/or exercise regimens, with or without the use of medications, supplements or herbal treatments associated with weight loss (eg, orlistat, lorcaserin, phentermine, topiramate, naltrexone, bupropion, glucagon-like peptide-1 [GLP-1] receptor agonists, etc.) are allowed if:
[1226] the regimen and/or dose has been stable for at least 3 months prior to randomization
[1227] the patient has not experienced weight loss 2% during the previous 3 months, and
[1228] the patient intends to keep the regimen and/or dose stable throughout the course of the study.

[1229] 2. Bariatric surgery or procedure (e.g., gastric bypass/band/sleeve, duodenal switch, gastric balloon, intestinal barrier, etc.) within the last 6 months. All patients with a history of bariatric surgery or procedures must be discussed with and receive approval from the Sponsor prior to enrollment. 3. Diagnosis of severe psychiatric disorders (e.g., schizophrenia, bipolar disorder, personality disorder), or Major Depressive Disorder (MDD) within the previous 2 years, or Screening Patient Health Questionnaire (PHQ) 9/PHQ A score ≥15, or any suicidal ideation of type 4 or 5 on the Columbia Suicide Severity Rating Scale (C SSRS) during Screening, or lifetime history of suicide attempts, or any suicidal behavior in the last month.

[1230] 4. Glycated hemoglobin (HbA1c) >10.0% at Screening.

[1231] 5. Current, clinically significant pulmonary, cardiac, or oncologic disease considered severe enough to interfere with the study and/or confound the results. Any patient with a potentially clinically significant disease should be reviewed with the Sponsor to determine eligibility.

[1232] 6. Glomerular filtration rate (GFR)<30 mL/min/1.73 m² during Screening.

[1233] 7. Significant dermatologic findings relating to melanoma or pre-melanoma skin lesions (excluding non-invasive basal or squamous cell lesion), determined as part of a comprehensive skin evaluation performed by the Investigator during Screening. Any concerning lesions identified during Screening will be biopsied and results known to be benign prior to enrollment. If the pre-treatment biopsy results are of significant concern, the patient is not eligible for study participation.

[1234] 8. History or close family history (parents or siblings) of skin cancer or melanoma (not including noninvasive, infiltrative basal or squamous cell lesion), or patient history of ocular-cutaneous albinism.

[1235] 9. Participation in any clinical study with an investigational drug/device within 3 months or 5 half-lives, whichever is longer, prior to the first setmelanotide dose.

[1236] 10. Previously enrolled in a clinical study involving setmelanotide or any previous exposure to setmelanotide.

[1237] 11. Inability to comply with once daily (QD) injection regimen.

[1238] 12. Pregnant and/or breastfeeding or desiring to become pregnant during this trial.

[1239] 13. Cognitive impairment that, in the Investigator's opinion, precludes participation to the study and completions of study procedures or questionnaires.

[1240] 14. Patient is, in Investigator's opinion, otherwise not suitable to participate in the study.

[1241] 15. Patients having obesity with other genetic or syndromic etiology (e.g., PPL[POMC, PCSK1, LEPR], Bardet-Biedel syndrome, Alstrom syndrome etc.) unrelated to hypothalamic trauma.

[1242] 16. Previous diagnosis of Prader-Willi syndrome, rapid-onset obesity with hypoventilation, hypothalamic, autonomic dysregulation, neuroendocrine tumor syndrome (ROHHADNET)

[1243] 17. If the patient is undergoing hormone replacement therapy, the dose has remained unchanged for at least 2 months before entry into the Screening Period.

### Duration of Treatment

[1244] All patients will receive study treatment for up to 12 months. Total study participation will last between 22 and 28 weeks, based on the variable length of the Screening Period

### Treatment

[1245] All patients will receive study treatment for up to 6 months during the placebo-controlled period. Total study participation in Stage A will last between 26 to 32 weeks, based on the variable length of the Screening Period. The Open label part will last another 24 weeks.

### Criteria for Evaluation

### Primary Endpoints:

[1246] % change in BMI from baseline after 24 weeks of setmelanotide compared to placebo.

### Key Secondary Endpoint:

[1247] Change in hunger in response to 24 weeks of setmelanotide treatment as measured by change from baseline in daily and global hunger scores in patients treated with setmelanotide compared to placebo after 24 weeks of treatment (End of Stage A).

### Secondary Endpoints:

[1248] Proportion of patients with ≥5% reduction from baseline in BMI in adult patients (≥18 yo) or a reduction in BMI Z-Score of ≥0.2 in pediatric patients (<18 yo) after 24 weeks of setmelanotide treatment compared to placebo
[1249] Proportion of patients aged ≥4 to <18 years with ≥0.2 reduction of BMI Z-score from baseline after 24 weeks of setmelanotide
[1250] Proportion of patients with ≥10% reduction from baseline in BMI in all patients and in patient >18 yo after 24 weeks of setmelanotide treatment compared to placebo
[1251] Proportion of patients with ≥15% reduction from baseline in BMI in all patients and in patient >18 yo after 24 weeks of setmelanotide treatment compared to placebo
[1252] Proportion of patients achieving BMI 27 (in adults) or <95^{th} (in peds) after 24 weeks on setmelanotide
[1253] Average BMI z and BMI percentile reduction in patients <18 yo after 24-weeks on setmelanotide
[1254] Mean percent Change from baseline in weight in patients ≥18 years after 60 weeks of setmelanotide treatment compared to placebo.
[1255] Average change in hyperphagia symptoms total score from Baseline to Week 24
[1256] Average change in the weekly average of the daily most hunger score in patients capable of completing the questionnaire (patients ≥12 yo)
[1257] The proportion of patients ≥12 years old, who achieve a ≥2 point reduction (improvement) from Baseline to end of Week 60 in the weekly average of the daily maximal hunger score for the setmelanotide group compared to the placebo group. Mean percent change in the weekly average of the daily maximal hunger score from Baseline to end of Stage A (Week 24) in patients ≥12 years old on setmelanotide treatment compared to placebo
[1258] Mean change from Baseline to end of Stage A (Week 24) in physical functioning score and total score for the Impact of Weight on Quality of Life-Lite (IWQOL) (IWQOL-Lite in patients ≥18 years old and IWQOL-Kids in patients 11-<18 years old), on setmelanotide treatment compared to placebo
[1259] Safety and tolerability of setmelanotide injection as determined by the presentation, frequency, and severity of treatment emergent adverse events (TEAEs) and serious adverse events (SAEs)

### Other Secondary Endpoints:

[1260] Change from baseline in waist circumference in patients aged 18 years after 24 weeks of setmelanotide treatment compared to placebo
[1261] Mean change from Baseline to end of Stage A (Week 24) in total score for the 5-level EuroQol 5 Dimension questionnaire (EQ-5D-5L in patients ≥16 years old and EQ-5D-5L Proxy version in patients <16 years old) on setmelanotide treatment compared to placebo
[1262] Mean change from Baseline to Week 60 in physical functioning score and total score for the Impact of Weight on Quality of Life-Lite (IWQOL) (IWQOL-Lite in patients ≥18 years old and IWQOL-Kids in patients 11-<18 years old), on setmelanotide treatment compared to placebo
[1263] Mean change from Baseline to end of Stage A (Week 24) in steps measured by actigraphy in patients on setmelanotide treatment compared to placebo,
[1264] Mean change from Baseline to end of Stage A (Week 24) in sleep hours measured by actigraphy in patients on setmelanotide treatment compared to placebo,

### Exploratory Endpoints:

[1265] Change from baseline in metabolic parameters following treatment with setmelanotide, including fasting glucose, HbA1c, lipid profiles (total-, high-density lipoprotein [HDL]-, and low-density lipoprotein [LDL]-cholesterol, triglycerides) compared to placebo at the end of the 24 weeks (end of stage A)
[1266] Change from baseline in metabolic parameters following treatment with setmelanotide, including fasting glucose, HbA1c, lipid profiles (total-, high-density lipoprotein [HDL]-, and low-density lipoprotein [LDL]-cholesterol, triglycerides) compared to placebo at the end of the Stage B months
[1267] Proportion of patients with ≥5% reduction from baseline in BMI in all patients and in patient >18 yo at the end of Stage B comparing pts on set for 24 weeks vs 48 weeks
[1268] Proportion of patients aged ≥6 to <18 years with ≥0.2 reduction of BMI Z-score from baseline the end of Stage B comparing pts on set for 24 weeks vs 48 weeks
[1269] Proportion of patients with ≥10% reduction from baseline in BMI in all patients and in patient >18 yo at the end of Stage B comparing pts on set for 24 weeks vs 48 weeks
[1270] Proportion of patients with ≥15% reduction from baseline in BMI in all patients and in patient >18 yo the end of Stage B comparing pts on set for 24 weeks vs 48 weeks
[1271] Proportion of patients achieving BMI <27 (in adults) or <95^{th} (in peds) the end of Stage B comparing pts on set for 24 weeks vs 48 weeks
[1272] Average BMI Z-Score and BMI percentile reduction in patients <18 yo at the end of Stage B comparing pts on set for 24 weeks vs 48 weeks
[1273] Mean percent Change from baseline in weight in patients >18 years the end of Stage B comparing pts on set for 24 weeks vs 48 weeks

### Safety Endpoints:

[1274] Safety and tolerability assessed by the frequency and severity of AEs, vital signs, and laboratory evaluations at the end Stage A in all patients treated with setmelanotide compared to placebo.

### EQUIVALENTS

[1275] The disclosures of each and every patent, patent application, and publication cited herein are hereby incorporated herein by reference in their entirety. While this invention has been disclosed with reference to specific aspects, it is apparent that other aspects and variations of this invention may be devised by others skilled in the art without departing from the true spirit and scope of the invention. The appended claims are intended to be construed to include all such aspects and equivalent variations.

The application's sequence listing, which the Patent Office published only in electronic form, follows.

SEQUENCE LISTING (693 sequences)

SEQ ID NO: 1 - protein, 8 aa, synthetic construct
  REGION 1..8: note = Description of sequence: MC4R agonist
  MOD_RES 1: note = Nle
  MOD_RES 4: note = d-Phenylalanine
  MOD_RES 7: note = Beta-alanine
  REGION 2..8: note = cyclical region
  CROSSLNK 2..8: note = Asp-Lys bond
  MOD_RES <1: note = Acetylated
  MOD_RES 8: note = NH2
XDHFRWAK

SEQ ID NO: 2 - protein, 8 aa, synthetic construct
  REGION 1..8: note = Description of sequence: MC4R agonist
  MOD_RES 1: note = Nle
  MOD_RES 4: note = d-Phenylalanine
  MOD_RES 7: note = 1-amino-1-cyclohexanecarboxylic acid
  REGION 2..8: note = cyclical region
  CROSSLNK 2..8: note = Asp-Lys bond
  MOD_RES <1: note = Acetylated
  MOD_RES 8: note = NH2
XDHFRWXK

SEQ ID NO: 3 - protein, 8 aa, synthetic construct
  REGION 1..8: note = Description of sequence: MC4R agonist
  MOD_RES 1: note = Nle
  MOD_RES 4: note = d-Phenylalanine
  MOD_RES 7: note = 6-aminohexanoic acid
  REGION 2..8: note = cyclical region
  CROSSLNK 2..8: note = Cys-Cys bond
  MOD_RES <1: note = Acetylated
  MOD_RES 8: note = NH2
XCHFRWXC

SEQ ID NO: 4 - protein, 9 aa, synthetic construct
  REGION 1..9: note = Description of sequence: MC4R agonist
  MOD_RES 1: note = d-Phenylalanine
  MOD_RES 4: note = d-Phenylalanine
  MOD_RES 8: note = d-Cysteine
  REGION 2..8: note = cyclical region
  CROSSLNK 2..8: note = Cys-dCys bond
  MOD_RES 9: note = NH2
FCHFRWACT

SEQ ID NO: 5 - protein, 9 aa, synthetic construct
  REGION 1..9: note = Description of sequence: MC4R agonist
  MOD_RES 1: note = d-Phenylalanine
  MOD_RES 4: note = d-Phenylalanine
  MOD_RES 7: note = Beta-alanine
  MOD_RES 8: note = d-Cysteine
  REGION 2..8: note = cyclical region
  CROSSLNK 2..8: note = Cys-dCys bond
  MOD_RES 9: note = NH2
FCHFRWACT

SEQ ID NO: 6 - protein, 9 aa, synthetic construct
  REGION 1..9: note = Description of sequence: MC4R agonist
  MOD_RES 1: note = d-Phenylalanine
  MOD_RES 4: note = d-Phenylalanine
  MOD_RES 7: note = 4Abu
  MOD_RES 8: note = d-Cysteine
  REGION 2..8: note = cyclical region
  CROSSLNK 2..8: note = Cys-dCys bond
  MOD_RES 9: note = NH2
FCHFRWXCT

SEQ ID NO: 7 - protein, 8 aa, synthetic construct
  REGION 1..8: note = Description of sequence: MC4R agonist
  MOD_RES 1: note = Nle
  MOD_RES 4: note = d-Phenylalanine
  MOD_RES 7: note = 5-aminopentanoic acid (HN-(CH2)4-C(O)
  REGION 2..8: note = cyclical region
  CROSSLNK 2..8: note = Cys-Cys bond
  MOD_RES <1: note = Acetylated
  MOD_RES 8: note = NH2
XCHFRWXC

SEQ ID NO: 8 - protein, 8 aa, synthetic construct
  REGION 1..8: note = Description of sequence: MC4R agonist
  MOD_RES 1: note = Nle
  MOD_RES 4: note = d-Phenylalanine
  MOD_RES 7: note = 5-aminopentanoic acid (HN-(CH2)4-C(O)
  REGION 2..8: note = cyclical region
  CROSSLNK 2..8: note = Asp-Lys bond
  MOD_RES <1: note = Acetylated
  MOD_RES 8: note = NH2
XDHFRWXK

SEQ ID NO: 9 - protein, 8 aa, synthetic construct
  REGION 1..8: note = Description of sequence: MC4R agonist
  MOD_RES 1: note = 1-amino-1-cyclohexanecarboxylic acid
  MOD_RES 4: note = d-Phenylalanine
  MOD_RES 7: note = 4Abu
  REGION 2..8: note = cyclical region
  CROSSLNK 2..8: note = Asp-Lys bond
  MOD_RES <1: note = Acetylated
  MOD_RES 8: note = NH2
XDHFRWXK

SEQ ID NO: 10 - protein, 8 aa, synthetic construct
  REGION 1..8: note = Description of sequence: MC4R agonist
  MOD_RES 1: note = d-beta-(2-naphthyl)alanine
  MOD_RES 4: note = d-Phenylalanine
  MOD_RES 7: note = 4Abu
  REGION 2..8: note = cyclical region
  CROSSLNK 2..8: note = Asp-Lys bond
  MOD_RES <1: note = Acetylated
  MOD_RES 8: note = NH2
XDHFRWXK

SEQ ID NO: 11 - protein, 8 aa, synthetic construct
  REGION 1..8: note = Description of sequence: MC4R agonist
  MOD_RES 1: note = beta-cyclohexylalanine
  MOD_RES 4: note = d-Phenylalanine
  MOD_RES 7: note = 4Abu
  REGION 2..8: note = cyclical region
  CROSSLNK 2..8: note = Asp-Lys bond
  MOD_RES <1: note = Acetylated
  MOD_RES 8: note = NH2
XDHFRWXK

SEQ ID NO: 12 - protein, 8 aa, synthetic construct
  REGION 1..8: note = Description of sequence: MC4R agonist
  MOD_RES 1: note = Nle
  MOD_RES 4: note = d-Phenylalanine
  MOD_RES 7: note = 4Abu
  REGION 2..8: note = cyclical region
  CROSSLNK 2..8: note = Asp-Lys bond
  MOD_RES <1: note = Acetylated
  MOD_RES 8: note = NH2
XDHFRWXK

SEQ ID NO: 13 - protein, 8 aa, synthetic construct
  REGION 1..8: note = Description of sequence: MC4R agonist
  MOD_RES 1: note = Nle
  MOD_RES 3: note = d-Alanine
  MOD_RES 5: note = d-Phenylalanine
  REGION 2..8: note = cyclical region
  CROSSLNK 2..8: note = Cys-Cys bond
  MOD_RES <1: note = Acetylated
  MOD_RES 8: note = NH2
XCAHFRWC

SEQ ID NO: 14 - protein, 8 aa, synthetic construct
  REGION 1..8: note = Description of sequence: MC4R agonist
  MOD_RES 1: note = Nle
  MOD_RES 3: note = Beta-alanine
  MOD_RES 5: note = d-Phenylalanine
  REGION 2..8: note = cyclical region
  CROSSLNK 2..8: note = Cys-Cys bond
  MOD_RES <1: note = Acetylated
  MOD_RES 8: note = NH2
XCAHFRWC

SEQ ID NO: 15 - protein, 8 aa, synthetic construct
  REGION 1..8: note = Description of sequence: MC4R agonist
  MOD_RES 1: note = Nle
  MOD_RES 3: note = 4Abu
  MOD_RES 5: note = d-Phenylalanine
  REGION 2..8: note = cyclical region
  CROSSLNK 2..8: note = Cys-Cys bond
  MOD_RES <1: note = Acetylated
  MOD_RES 8: note = NH2
XCXHFRWC

SEQ ID NO: 16 - protein, 8 aa, synthetic construct
  REGION 1..8: note = Description of sequence: MC4R agonist
  MOD_RES 1: note = Nle
  MOD_RES 3: note = alpha- aminoisobutyric acid
  MOD_RES 5: note = d-Phenylalanine
  REGION 2..8: note = cyclical region
  CROSSLNK 2..8: note = Cys-Cys bond
  MOD_RES <1: note = Acetylated
  MOD_RES 8: note = NH2
XCXHFRWC

SEQ ID NO: 17 - protein, 8 aa, synthetic construct
  REGION 1..8: note = Description of sequence: MC4R agonist
  MOD_RES 1: note = Nle
  MOD_RES 5: note = d-Phenylalanine
  REGION 2..8: note = cyclical region
  CROSSLNK 2..8: note = Cys-Cys bond
  MOD_RES <1: note = Acetylated
  MOD_RES 8: note = NH2
XCGHFRWC

SEQ ID NO: 18 - protein, 8 aa, synthetic construct
  REGION 1..8: note = Description of sequence: MC4R agonist
  MOD_RES 1: note = Nle
  MOD_RES 2: note = d-Cysteine
  MOD_RES 5: note = d-Phenylalanine
  REGION 2..8: note = cyclical region
  CROSSLNK 2..8: note = dCys-Cys bond
  MOD_RES <1: note = Acetylated
  MOD_RES 8: note = NH2
XCAHFRWC

SEQ ID NO: 19 - protein, 8 aa, synthetic construct
  REGION 1..8: note = Description of sequence: MC4R agonist
  MOD_RES 1: note = Nle
  MOD_RES 2: note = d-Cysteine
  MOD_RES 3: note = d-Alanine
  MOD_RES 5: note = d-Phenylalanine
  REGION 2..8: note = cyclical region
  CROSSLNK 2..8: note = dCys-Cys bond
  MOD_RES <1: note = Acetylated
  MOD_RES 8: note = NH2
XCAHFRWC

SEQ ID NO: 20 - protein, 8 aa, synthetic construct
  REGION 1..8: note = Description of sequence: MC4R agonist
  MOD_RES 1: note = Nle
  MOD_RES 2: note = d-Cysteine
  MOD_RES 3: note = Beta-alanine
  MOD_RES 5: note = d-Phenylalanine
  REGION 2..8: note = cyclical region
  CROSSLNK 2..8: note = dCys-Cys bond
  MOD_RES <1: note = Acetylated
  MOD_RES 8: note = NH2
XCAHFRWC

SEQ ID NO: 21 - protein, 8 aa, synthetic construct
  REGION 1..8: note = Description of sequence: MC4R agonist
  MOD_RES 1: note = Nle
  MOD_RES 2: note = d-Cysteine
  MOD_RES 3: note = 4Abu
  MOD_RES 5: note = d-Phenylalanine
  REGION 2..8: note = cyclical region
  CROSSLNK 2..8: note = dCys-Cys bond
  MOD_RES <1: note = Acetylated
  MOD_RES 8: note = NH2
XCXHFRWC

SEQ ID NO: 22 - protein, 8 aa, synthetic construct
  REGION 1..8: note = Description of sequence: MC4R agonist
  MOD_RES 1: note = Nle
  MOD_RES 2: note = d-Cysteine
  MOD_RES 3: note = alpha- aminoisobutyric acid
  MOD_RES 5: note = d-Phenylalanine
  REGION 2..8: note = cyclical region
  CROSSLNK 2..8: note = dCys-Cys bond
  MOD_RES <1: note = Acetylated
  MOD_RES 8: note = NH2
XCXHFRWC

SEQ ID NO: 23 - protein, 8 aa, synthetic construct
  REGION 1..8: note = Description of sequence: MC4R agonist
  MOD_RES 1: note = Nle
  MOD_RES 2: note = d-Cysteine
  MOD_RES 5: note = d-Phenylalanine
  REGION 2..8: note = cyclical region
  CROSSLNK 2..8: note = dCys-Cys bond
  MOD_RES <1: note = Acetylated
  MOD_RES 8: note = NH2
XCGHFRWC

SEQ ID NO: 24 - protein, 8 aa, synthetic construct
  REGION 1..8: note = Description of sequence: MC4R agonist
  MOD_RES 1: note = Nle
  MOD_RES 3: note = d-Alanine
  MOD_RES 5: note = d-Phenylalanine
  MOD_RES 8: note = d-Cysteine
  REGION 2..8: note = cyclical region
  CROSSLNK 2..8: note = Cys-dCys bond
  MOD_RES <1: note = Acetylated
  MOD_RES 8: note = NH2
XCAHFRWC

SEQ ID NO: 25 - protein, 8 aa, synthetic construct
  REGION 1..8: note = Description of sequence: MC4R agonist
  MOD_RES 1: note = Nle
  MOD_RES 3: note = Beta-alanine
  MOD_RES 5: note = d-Phenylalanine
  MOD_RES 8: note = d-Cysteine
  REGION 2..8: note = cyclical region
  CROSSLNK 2..8: note = Cys-dCys bond
  MOD_RES <1: note = Acetylated
  MOD_RES 8: note = NH2
XCAHFRWC

SEQ ID NO: 26 - protein, 8 aa, synthetic construct
  REGION 1..8: note = Description of sequence: MC4R agonist
  MOD_RES 1: note = Nle
  MOD_RES 3: note = 4Abu
  MOD_RES 5: note = d-Phenylalanine
  MOD_RES 8: note = d-Cysteine
  REGION 2..8: note = cyclical region
  CROSSLNK 2..8: note = Cys-dCys bond
  MOD_RES <1: note = Acetylated
  MOD_RES 8: note = NH2
XCXHFRWC

SEQ ID NO: 27 - protein, 8 aa, synthetic construct
  REGION 1..8: note = Description of sequence: MC4R agonist
  MOD_RES 1: note = Nle
  MOD_RES 3: note = alpha- aminoisobutyric acid
  MOD_RES 5: note = d-Phenylalanine
  MOD_RES 8: note = d-Cysteine
  REGION 2..8: note = cyclical region
  CROSSLNK 2..8: note = Cys-dCys bond
  MOD_RES <1: note = Acetylated
  MOD_RES 8: note = NH2
XCXHFRWC

SEQ ID NO: 28 - protein, 8 aa, synthetic construct
  REGION 1..8: note = Description of sequence: MC4R agonist
  MOD_RES 1: note = Nle
  MOD_RES 5: note = d-Phenylalanine
  MOD_RES 8: note = d-Cysteine
  REGION 2..8: note = cyclical region
  CROSSLNK 2..8: note = Cys-dCys bond
  MOD_RES <1: note = Acetylated
  MOD_RES 8: note = NH2
XCGHFRWC

SEQ ID NO: 29 - protein, 8 aa, synthetic construct
  REGION 1..8: note = Description of sequence: MC4R agonist
  MOD_RES 1: note = Nle
  MOD_RES 2: note = d-Cysteine
  MOD_RES 5: note = d-Phenylalanine
  MOD_RES 8: note = d-Cysteine
  REGION 2..8: note = cyclical region
  CROSSLNK 2..8: note = dCys-dCys bond
  MOD_RES <1: note = Acetylated
  MOD_RES 8: note = NH2
XCAHFRWC

SEQ ID NO: 30 - protein, 8 aa, synthetic construct
  REGION 1..8: note = Description of sequence: MC4R agonist
  MOD_RES 1: note = Nle
  MOD_RES 2: note = d-Cysteine
  MOD_RES 3: note = d-Alanine
  MOD_RES 5: note = d-Phenylalanine
  MOD_RES 8: note = d-Cysteine
  REGION 2..8: note = cyclical region
  CROSSLNK 2..8: note = dCys-dCys bond
  MOD_RES <1: note = Acetylated
  MOD_RES 8: note = NH2
XCAHFRWC

SEQ ID NO: 31 - protein, 8 aa, synthetic construct
  REGION 1..8: note = Description of sequence: MC4R agonist
  MOD_RES 1: note = Nle
  MOD_RES 2: note = d-Cysteine
  MOD_RES 3: note = Beta-alanine
  MOD_RES 5: note = d-Phenylalanine
  MOD_RES 8: note = d-Cysteine
  REGION 2..8: note = cyclical region
  CROSSLNK 2..8: note = dCys-dCys bond
  MOD_RES <1: note = Acetylated
  MOD_RES 8: note = NH2
XCAHFRWC

SEQ ID NO: 32 - protein, 8 aa, synthetic construct
  REGION 1..8: note = Description of sequence: MC4R agonist
  MOD_RES 1: note = Nle
  MOD_RES 2: note = d-Cysteine
  MOD_RES 3: note = 4Abu
  MOD_RES 5: note = d-Phenylalanine
  MOD_RES 8: note = d-Cysteine
  REGION 2..8: note = cyclical region
  CROSSLNK 2..8: note = dCys-dCys bond
  MOD_RES <1: note = Acetylated
  MOD_RES 8: note = NH2
XCXHFRWC

SEQ ID NO: 33 - protein, 8 aa, synthetic construct
  REGION 1..8: note = Description of sequence: MC4R agonist
  MOD_RES 1: note = Nle
  MOD_RES 2: note = d-Cysteine
  MOD_RES 3: note = alpha- aminoisobutyric acid
  MOD_RES 5: note = d-Phenylalanine
  MOD_RES 8: note = d-Cysteine
  REGION 2..8: note = cyclical region
  CROSSLNK 2..8: note = dCys-dCys bond
  MOD_RES <1: note = Acetylated
  MOD_RES 8: note = NH2
XCXHFRWC

SEQ ID NO: 34 - protein, 8 aa, synthetic construct
  REGION 1..8: note = Description of sequence: MC4R agonist
  MOD_RES 1: note = Oic
  MOD_RES 4: note = d-Phenylalanine
  MOD_RES 7: note = 4Abu
  REGION 2..8: note = cyclical region
  CROSSLNK 2..8: note = Asp-Lys bond
  MOD_RES <1: note = Acetylated
  MOD_RES 8: note = NH2
XDHFRWXK

SEQ ID NO: 35 - protein, 8 aa, synthetic construct
  REGION 1..8: note = Description of sequence: MC4R agonist
  MOD_RES 1: note = Cyclohexylglycine
  MOD_RES 4: note = d-Phenylalanine
  MOD_RES 7: note = 4Abu
  REGION 2..8: note = cyclical region
  CROSSLNK 2..8: note = Asp-Lys bond
  MOD_RES <1: note = Acetylated
  MOD_RES 8: note = NH2
XDHFRWXK

SEQ ID NO: 36 - protein, 8 aa, synthetic construct
  REGION 1..8: note = Description of sequence: MC4R agonist
  MOD_RES 1: note = homo-beta-cyclohexylalanine
  MOD_RES 4: note = d-Phenylalanine
  MOD_RES 7: note = 4Abu
  REGION 2..8: note = cyclical region
  CROSSLNK 2..8: note = Asp-Lys bond
  MOD_RES <1: note = Acetylated
  MOD_RES 8: note = NH2
XDHFRWXK

SEQ ID NO: 37 - protein, 8 aa, synthetic construct
  REGION 1..8: note = Description of sequence: MC4R agonist
  MOD_RES 1: note = d-beta-cyclohexylalanine
  MOD_RES 4: note = d-Phenylalanine
  MOD_RES 7: note = 4Abu
  REGION 2..8: note = cyclical region
  CROSSLNK 2..8: note = Asp-Lys bond
  MOD_RES <1: note = Acetylated
  MOD_RES 8: note = NH2
XDHFRWXK

SEQ ID NO: 38 - protein, 8 aa, synthetic construct
  REGION 1..8: note = Description of sequence: MC4R agonist
  MOD_RES 1: note = d-homo-beta-cyclohexylalanine
  MOD_RES 4: note = d-Phenylalanine
  MOD_RES 7: note = 4Abu
  REGION 2..8: note = cyclical region
  CROSSLNK 2..8: note = Asp-Lys bond
  MOD_RES <1: note = Acetylated
  MOD_RES 8: note = NH2
XDHFRWXK

SEQ ID NO: 39 - protein, 8 aa, synthetic construct
  REGION 1..8: note = Description of sequence: MC4R agonist
  MOD_RES 1: note = nipecotic acid
  MOD_RES 4: note = d-Phenylalanine
  MOD_RES 7: note = 4Abu
  REGION 2..8: note = cyclical region
  CROSSLNK 2..8: note = Asp-Lys bond
  MOD_RES <1: note = Acetylated
  MOD_RES 8: note = NH2
XDHFRWXK

SEQ ID NO: 40 - protein, 8 aa, synthetic construct
  REGION 1..8: note = Description of sequence: MC4R agonist
  MOD_RES 1: note = homoproline
  MOD_RES 4: note = d-Phenylalanine
  MOD_RES 7: note = 4Abu
  REGION 2..8: note = cyclical region
  CROSSLNK 2..8: note = Asp-Lys bond
  MOD_RES <1: note = Acetylated
  MOD_RES 8: note = NH2
PDHFRWXK

SEQ ID NO: 41 - protein, 8 aa, synthetic construct
  REGION 1..8: note = Description of sequence: MC4R agonist
  MOD_RES 1: note = homoleucine
  MOD_RES 4: note = d-Phenylalanine
  MOD_RES 7: note = 4Abu
  REGION 2..8: note = cyclical region
  CROSSLNK 2..8: note = Asp-Lys bond
  MOD_RES <1: note = Acetylated
  MOD_RES 8: note = NH2
LDHFRWXK

SEQ ID NO: 42 - protein, 8 aa, synthetic construct
  REGION 1..8: note = Description of sequence: MC4R agonist
  MOD_RES 4: note = d-Phenylalanine
  MOD_RES 7: note = 4Abu
  REGION 2..8: note = cyclical region
  CROSSLNK 2..8: note = Asp-Lys bond
  MOD_RES <1: note = Acetylated
  MOD_RES 8: note = NH2
FDHFRWXK

SEQ ID NO: 43 - protein, 8 aa, synthetic construct
  REGION 1..8: note = Description of sequence: MC4R agonist
  MOD_RES 1: note = d-Phenylalanine
  MOD_RES 4: note = d-Phenylalanine
  MOD_RES 7: note = 4Abu
  REGION 2..8: note = cyclical region
  CROSSLNK 2..8: note = Asp-Lys bond
  MOD_RES <1: note = Acetylated
  MOD_RES 8: note = NH2
FDHFRWXK

SEQ ID NO: 44 - protein, 8 aa, synthetic construct
  REGION 1..8: note = Description of sequence: MC4R agonist
  MOD_RES 1: note = dCyclohexylglycine
  MOD_RES 4: note = d-Phenylalanine
  MOD_RES 7: note = 4Abu
  REGION 2..8: note = cyclical region
  CROSSLNK 2..8: note = Asp-Lys bond
  MOD_RES <1: note = Acetylated
  MOD_RES 8: note = NH2
XDHFRWXK

SEQ ID NO: 45 - protein, 8 aa, synthetic construct
  REGION 1..8: note = Description of sequence: MC4R agonist
  MOD_RES 1: note = nbutanoylbeta-cyclohexylalanine
  MOD_RES 4: note = d-Phenylalanine
  MOD_RES 7: note = 4Abu
  REGION 2..8: note = cyclical region
  CROSSLNK 2..8: note = Asp-Lys bond
  MOD_RES 8: note = NH2
XDHFRWXK

SEQ ID NO: 46 - protein, 8 aa, synthetic construct
  REGION 1..8: note = Description of sequence: MC4R agonist
  MOD_RES 1: note = nbutyrylbeta-cyclohexylalanine
  MOD_RES 4: note = d-Phenylalanine
  MOD_RES 7: note = 4Abu
  REGION 2..8: note = cyclical region
  CROSSLNK 2..8: note = Asp-Lys bond
  MOD_RES 8: note = NH2
XDHFRWXK

SEQ ID NO: 47 - protein, 8 aa, synthetic construct
  REGION 1..8: note = Description of sequence: MC4R agonist
  MOD_RES 1: note = homophenylalanine
  MOD_RES 4: note = d-Phenylalanine
  MOD_RES 7: note = 4Abu
  REGION 2..8: note = cyclical region
  CROSSLNK 2..8: note = Asp-Lys bond
  MOD_RES <1: note = Acetylated
  MOD_RES 8: note = NH2
FDHFRWXK

SEQ ID NO: 48 - protein, 8 aa, synthetic construct
  REGION 1..8: note = Description of sequence: MC4R agonist
  MOD_RES 1: note = beta-homomethionine
  MOD_RES 4: note = d-Phenylalanine
  MOD_RES 7: note = 4Abu
  REGION 2..8: note = cyclical region
  CROSSLNK 2..8: note = Asp-Lys bond
  MOD_RES <1: note = Acetylated
  MOD_RES 8: note = NH2
MDHFRWXK

SEQ ID NO: 49 - protein, 8 aa, synthetic construct
  REGION 1..8: note = Description of sequence: MC4R agonist
  MOD_RES 1: note = 4Abu
  MOD_RES 4: note = d-Phenylalanine
  MOD_RES 7: note = 4Abu
  REGION 2..8: note = cyclical region
  CROSSLNK 2..8: note = Asp-Lys bond
  MOD_RES <1: note = Acetylated
  MOD_RES 8: note = NH2
XDHFRWXK

SEQ ID NO: 50 - protein, 8 aa, synthetic construct
  REGION 1..8: note = Description of sequence: MC4R agonist
  MOD_RES 1: note = beta-cyclohexylalanine
  MOD_RES 4: note = d-Phenylalanine
  MOD_RES 6: note = d-Tryptophan
  REGION 2..8: note = cyclical region
  CROSSLNK 2..8: note = Asp-Lys bond
  MOD_RES <1: note = Acetylated
  MOD_RES 8: note = NH2
XDHFRWAK

SEQ ID NO: 51 - protein, 8 aa, synthetic construct
  REGION 1..8: note = Description of sequence: MC4R agonist
  MOD_RES 1: note = hbeta-cyclohexylalanine
  MOD_RES 4: note = d-Phenylalanine
  MOD_RES 6: note = d-Tryptophan
  REGION 2..8: note = cyclical region
  CROSSLNK 2..8: note = Asp-Lys bond
  MOD_RES <1: note = Acetylated
  MOD_RES 8: note = NH2
XDHFRWAK

SEQ ID NO: 52 - protein, 8 aa, synthetic construct
  REGION 1..8: note = Description of sequence: MC4R agonist
  MOD_RES 4: note = d-Phenylalanine
  MOD_RES 6: note = d-Tryptophan
  REGION 2..8: note = cyclical region
  CROSSLNK 2..8: note = Asp-Lys bond
  MOD_RES <1: note = Acetylated
  MOD_RES 8: note = NH2
LDHFRWAK

SEQ ID NO: 53 - protein, 8 aa, synthetic construct
  REGION 1..8: note = Description of sequence: MC4R agonist
  MOD_RES 1: note = homoleucine
  MOD_RES 4: note = d-Phenylalanine
  MOD_RES 6: note = d-Tryptophan
  REGION 2..8: note = cyclical region
  CROSSLNK 2..8: note = Asp-Lys bond
  MOD_RES <1: note = Acetylated
  MOD_RES 8: note = NH2
LDHFRWAK

SEQ ID NO: 54 - protein, 8 aa, synthetic construct
  REGION 1..8: note = Description of sequence: MC4R agonist
  MOD_RES 4: note = d-Phenylalanine
  MOD_RES 6: note = d-Tryptophan
  REGION 2..8: note = cyclical region
  CROSSLNK 2..8: note = Asp-Lys bond
  MOD_RES <1: note = Acetylated
  MOD_RES 8: note = NH2
FDHFRWAK

SEQ ID NO: 55 - protein, 8 aa, synthetic construct
  REGION 1..8: note = Description of sequence: MC4R agonist
  MOD_RES 1: note = Nle
  MOD_RES 4: note = d-Phenylalanine
  MOD_RES 6: note = d-Tryptophan
  MOD_RES 7: note = d-Alanine
  REGION 2..8: note = cyclical region
  CROSSLNK 2..8: note = Asp-Lys bond
  MOD_RES <1: note = Acetylated
  MOD_RES 8: note = NH2
XDHFRWAK

SEQ ID NO: 56 - protein, 8 aa, synthetic construct
  REGION 1..8: note = Description of sequence: MC4R agonist
  MOD_RES 1: note = Nle
  MOD_RES 4: note = d-Phenylalanine
  MOD_RES 6: note = d-Tryptophan
  MOD_RES 7: note = Beta-alanine
  REGION 2..8: note = cyclical region
  CROSSLNK 2..8: note = Asp-Lys bond
  MOD_RES <1: note = Acetylated
  MOD_RES 8: note = NH2
XDHFRWAK

SEQ ID NO: 57 - protein, 8 aa, synthetic construct
  REGION 1..8: note = Description of sequence: MC4R agonist
  MOD_RES 1: note = Nle
  MOD_RES 4: note = d-Phenylalanine
  MOD_RES 6: note = d-Tryptophan
  MOD_RES 7: note = 4Abu
  REGION 2..8: note = cyclical region
  CROSSLNK 2..8: note = Asp-Lys bond
  MOD_RES <1: note = Acetylated
  MOD_RES 8: note = NH2
XDHFRWXK

SEQ ID NO: 58 - protein, 8 aa, synthetic construct
  REGION 1..8: note = Description of sequence: MC4R agonist
  MOD_RES 1: note = Nle
  MOD_RES 4: note = d-Phenylalanine
  MOD_RES 6: note = d-Tryptophan
  MOD_RES 7: note = 7-aminoheptanoic acid
  REGION 2..8: note = cyclical region
  CROSSLNK 2..8: note = Asp-Lys bond
  MOD_RES <1: note = Acetylated
  MOD_RES 8: note = NH2
XDHFRWXK

SEQ ID NO: 59 - protein, 8 aa, synthetic construct
  REGION 1..8: note = Description of sequence: MC4R agonist
  MOD_RES 1: note = Nle
  MOD_RES 4: note = d-Phenylalanine
  MOD_RES 6: note = d-Tryptophan
  MOD_RES 7: note = 5-aminopentanoic acid (HN-(CH2)4-C(O)
  REGION 2..8: note = cyclical region
  CROSSLNK 2..8: note = Asp-Lys bond
  MOD_RES <1: note = Acetylated
  MOD_RES 8: note = NH2
XDHFRWXK

SEQ ID NO: 60 - protein, 8 aa, synthetic construct
  REGION 1..8: note = Description of sequence: MC4R agonist
  MOD_RES 1: note = Nle
  MOD_RES 4: note = d-Phenylalanine
  MOD_RES 6: note = d-Tryptophan
  MOD_RES 7: note = 5-aminopentanoic acid (HN-(CH2)4-C(O)
  REGION 2..8: note = cyclical region
  CROSSLNK 2..8: note = Cys-Cys bond
  MOD_RES <1: note = Acetylated
  MOD_RES 8: note = NH2
XCHFRWXC

SEQ ID NO: 61 - protein, 8 aa, synthetic construct
  REGION 1..8: note = Description of sequence: MC4R agonist
  MOD_RES 1: note = Nle
  MOD_RES 4: note = d-Phenylalanine
  MOD_RES 6: note = d-Tryptophan
  MOD_RES 7: note = 4Abu
  REGION 2..8: note = cyclical region
  CROSSLNK 2..8: note = Cys-Cys bond
  MOD_RES <1: note = Acetylated
  MOD_RES 8: note = NH2
XCHFRWXC

SEQ ID NO: 62 - protein, 8 aa, synthetic construct
  REGION 1..8: note = Description of sequence: MC4R agonist
  MOD_RES 1: note = Nle
  MOD_RES 4: note = d-Phenylalanine
  MOD_RES 6: note = d-Tryptophan
  MOD_RES 7: note = 6-aminohexanoic acid
  REGION 2..8: note = cyclical region
  CROSSLNK 2..8: note = Cys-Cys bond
  MOD_RES <1: note = Acetylated
  MOD_RES 8: note = NH2
XCHFRWXC

SEQ ID NO: 63 - protein, 8 aa, synthetic construct
  REGION 1..8: note = Description of sequence: MC4R agonist
  MOD_RES 1: note = Nle
  MOD_RES 4: note = d-Phenylalanine
  MOD_RES 6: note = d-Tryptophan
  MOD_RES 7: note = Beta-alanine
  REGION 2..8: note = cyclical region
  CROSSLNK 2..8: note = Cys-Cys bond
  MOD_RES <1: note = Acetylated
  MOD_RES 8: note = NH2
XCHFRWAC

SEQ ID NO: 64 - protein, 8 aa, synthetic construct
  REGION 1..8: note = Description of sequence: MC4R agonist
  MOD_RES 1: note = Nle
  MOD_RES 4: note = d-Phenylalanine
  MOD_RES 6: note = d-Tryptophan
  MOD_RES 7: note = d-Alanine
  REGION 2..8: note = cyclical region
  CROSSLNK 2..8: note = Cys-Cys bond
  MOD_RES <1: note = Acetylated
  MOD_RES 8: note = NH2
XCHFRWAC

SEQ ID NO: 65 - protein, 8 aa, synthetic construct
  REGION 1..8: note = Description of sequence: MC4R agonist
  MOD_RES 1: note = Nle
  MOD_RES 3: note = d-Alanine
  MOD_RES 5: note = d-beta-(2-naphthyl)alanine
  REGION 2..8: note = cyclical region
  CROSSLNK 2..8: note = Cys-Cys bond
  MOD_RES <1: note = Acetylated
  MOD_RES 8: note = NH2
XCAHXRWC

SEQ ID NO: 66 - protein, 8 aa, synthetic construct
  REGION 1..8: note = Description of sequence: MC4R agonist
  MOD_RES 1: note = Nle
  MOD_RES 3: note = d-Alanine
  MOD_RES 5: note = d-beta-(2-naphthyl)alanine
  MOD_RES 7: note = beta-(2-naphthyl)alanine
  REGION 2..8: note = cyclical region
  CROSSLNK 2..8: note = Cys-Cys bond
  MOD_RES <1: note = Acetylated
  MOD_RES 8: note = NH2
XCAHXRXC

SEQ ID NO: 67 - protein, 8 aa, synthetic construct
  REGION 1..8: note = Description of sequence: MC4R agonist
  MOD_RES 1: note = Nle
  MOD_RES 3: note = d-Alanine
  MOD_RES 5: note = d-beta-(2-naphthyl)alanine
  MOD_RES 7: note = beta-(1-naphthyl)alanine
  REGION 2..8: note = cyclical region
  CROSSLNK 2..8: note = Cys-Cys bond
  MOD_RES <1: note = Acetylated
  MOD_RES 8: note = NH2
XCAHXRXC

SEQ ID NO: 68 - protein, 8 aa, synthetic construct
  REGION 1..8: note = Description of sequence: MC4R agonist
  MOD_RES 1: note = n-butanoyl-Nle
  MOD_RES 3: note = d-Alanine
  MOD_RES 5: note = d-Phenylalanine
  MOD_RES 7: note = beta-(2-naphthyl)alanine
  REGION 2..8: note = cyclical region
  CROSSLNK 2..8: note = Cys-Cys bond
  MOD_RES 8: note = NH2
XCAHFRXC

SEQ ID NO: 69 - protein, 8 aa, synthetic construct
  REGION 1..8: note = Description of sequence: MC4R agonist
  MOD_RES 1: note = n-butanoyl-Nle
  MOD_RES 3: note = d-Alanine
  MOD_RES 5: note = d-Phenylalanine
  REGION 2..8: note = cyclical region
  CROSSLNK 2..8: note = Cys-Cys bond
  MOD_RES 8: note = NH2
XCAHFRWC

SEQ ID NO: 70 - protein, 8 aa, synthetic construct
  REGION 1..8: note = Description of sequence: MC4R agonist
  MOD_RES 1: note = Nle
  MOD_RES 3: note = d-Alanine
  MOD_RES 5: note = d-Phenylalanine
  MOD_RES 7: note = beta-(2-naphthyl)alanine
  REGION 2..8: note = cyclical region
  CROSSLNK 2..8: note = Cys-Cys bond
  MOD_RES <1: note = Acetylated
  MOD_RES 8: note = NH2
XCAHFRXC

SEQ ID NO: 71 - protein, 8 aa, synthetic construct
  REGION 1..8: note = Description of sequence: MC4R agonist
  MOD_RES 1: note = Nle
  MOD_RES 3: note = d-Alanine
  MOD_RES 5: note = d-Phenylalanine
  MOD_RES 7: note = beta-(1-naphthyl)alanine
  REGION 2..8: note = cyclical region
  CROSSLNK 2..8: note = Cys-Cys bond
  MOD_RES <1: note = Acetylated
  MOD_RES 8: note = NH2
XCAHFRXC

SEQ ID NO: 72 - protein, 8 aa, synthetic construct
  REGION 1..8: note = Description of sequence: MC4R agonist
  MOD_RES 1: note = Nle
  MOD_RES 3: note = d-Alanine
  MOD_RES 5: note = d-Phenylalanine
  MOD_RES 7: note = 3-benzothienylalanine
  REGION 2..8: note = cyclical region
  CROSSLNK 2..8: note = Cys-Cys bond
  MOD_RES <1: note = Acetylated
  MOD_RES 8: note = NH2
XCAHFRXC

SEQ ID NO: 73 - protein, 8 aa, synthetic construct
  REGION 1..8: note = Description of sequence: MC4R agonist
  MOD_RES 1: note = Nle
  MOD_RES 3: note = dGlu
  MOD_RES 5: note = d-Phenylalanine
  REGION 2..8: note = cyclical region
  CROSSLNK 2..8: note = Cys-Cys bond
  MOD_RES <1: note = Acetylated
  MOD_RES 8: note = NH2
XCEHFRWC

SEQ ID NO: 74 - protein, 8 aa, synthetic construct
  REGION 1..8: note = Description of sequence: MC4R agonist
  MOD_RES 1: note = Nle
  MOD_RES 4: note = d-Phenylalanine
  MOD_RES 7: note = d-Alanine
  REGION 2..8: note = cyclical region
  CROSSLNK 2..8: note = Asp-Lys bond
  MOD_RES <1: note = Acetylated
  MOD_RES 8: note = NH2
XDHFRWAK

SEQ ID NO: 75 - protein, 8 aa, synthetic construct
  REGION 1..8: note = Description of sequence: MC4R agonist
  MOD_RES 1: note = Nle
  MOD_RES 3: note = d-Alanine
  MOD_RES 5: note = d-beta-(2-naphthyl)alanine
  MOD_RES 7: note = 3-benzothienylalanine
  REGION 2..8: note = cyclical region
  CROSSLNK 2..8: note = Cys-Cys bond
  MOD_RES <1: note = Acetylated
  MOD_RES 8: note = NH2
XCAHXRXC

SEQ ID NO: 76 - protein, 8 aa, synthetic construct
  REGION 1..8: note = Description of sequence: MC4R agonist
  MOD_RES 1: note = Nle
  MOD_RES 2: note = Penicillamine
  MOD_RES 3: note = d-Alanine
  MOD_RES 5: note = d-Phenylalanine
  REGION 2..8: note = cyclical region
  CROSSLNK 2..8: note = Pen-Cys bond
  MOD_RES <1: note = Acetylated
  MOD_RES 8: note = NH2
XXAHFRWC

SEQ ID NO: 77 - protein, 8 aa, synthetic construct
  REGION 1..8: note = Description of sequence: MC4R agonist
  MOD_RES 1: note = Nle
  MOD_RES 3: note = d-Alanine
  MOD_RES 5: note = d-Phenylalanine
  MOD_RES 8: note = Penicillamine
  REGION 2..8: note = cyclical region
  CROSSLNK 2..8: note = Cys-Pen bond
  MOD_RES <1: note = Acetylated
  MOD_RES 8: note = NH2
XCAHFRWX

SEQ ID NO: 78 - protein, 8 aa, synthetic construct
  REGION 1..8: note = Description of sequence: MC4R agonist
  MOD_RES 1: note = Nle
  MOD_RES 2: note = Penicillamine
  MOD_RES 3: note = d-Alanine
  MOD_RES 5: note = d-Phenylalanine
  MOD_RES 8: note = Penicillamine
  REGION 2..8: note = cyclical region
  CROSSLNK 2..8: note = Pen-Pen bond
  MOD_RES <1: note = Acetylated
  MOD_RES 8: note = NH2
XXAHFRWX

SEQ ID NO: 79 - protein, 9 aa, synthetic construct
  REGION 1..9: note = Description of sequence: MC4R agonist
  MOD_RES 1: note = d-Phenylalanine
  MOD_RES 4: note = d-Phenylalanine
  MOD_RES 5: note = Homoarginine
  MOD_RES 7: note = Beta-alanine
  MOD_RES 8: note = d-Cysteine
  REGION 2..8: note = cyclical region
  CROSSLNK 2..8: note = Cys-dCys bond
  MOD_RES 9: note = NH2
FCHFRWACT

SEQ ID NO: 80 - protein, 9 aa, synthetic construct
  REGION 1..9: note = Description of sequence: MC4R agonist
  MOD_RES 1: note = d-Phenylalanine
  MOD_RES 4: note = D-ethyl-tyrosine
  MOD_RES 7: note = Beta-alanine
  MOD_RES 8: note = d-Cysteine
  REGION 2..8: note = cyclical region
  CROSSLNK 2..8: note = Cys-dCys bond
  MOD_RES 9: note = NH2
FCHYRWACT

SEQ ID NO: 81 - protein, 9 aa, synthetic construct
  REGION 1..9: note = Description of sequence: MC4R agonist
  MOD_RES 1: note = d-Phenylalanine
  MOD_RES 4: note = d-Phenylalanine
  MOD_RES 6: note = biphenylalanine
  MOD_RES 7: note = Beta-alanine
  MOD_RES 8: note = d-Cysteine
  REGION 2..8: note = cyclical region
  CROSSLNK 2..8: note = Cys-dCys bond
  MOD_RES 9: note = NH2
FCHFRXACT

SEQ ID NO: 82 - protein, 9 aa, synthetic construct
  REGION 1..9: note = Description of sequence: MC4R agonist
  MOD_RES 1: note = d-Phenylalanine
  MOD_RES 4: note = D-ethyl-tyrosine
  MOD_RES 5: note = Homoarginine
  MOD_RES 7: note = Beta-alanine
  MOD_RES 8: note = d-Cysteine
  REGION 2..8: note = cyclical region
  CROSSLNK 2..8: note = Cys-dCys bond
  MOD_RES 9: note = NH2
FCHYRWACT

SEQ ID NO: 83 - protein, 9 aa, synthetic construct
  REGION 1..9: note = Description of sequence: MC4R agonist
  MOD_RES 1: note = d-Phenylalanine
  MOD_RES 4: note = d-Phenylalanine
  MOD_RES 5: note = Homoarginine
  MOD_RES 6: note = biphenylalanine
  MOD_RES 7: note = Beta-alanine
  MOD_RES 8: note = d-Cysteine
  REGION 2..8: note = cyclical region
  CROSSLNK 2..8: note = Cys-dCys bond
  MOD_RES 9: note = NH2
FCHFRXACT

SEQ ID NO: 84 - protein, 9 aa, synthetic construct
  REGION 1..9: note = Description of sequence: MC4R agonist
  MOD_RES 1: note = d-Phenylalanine
  MOD_RES 4: note = D-ethyl-tyrosine
  MOD_RES 5: note = Homoarginine
  MOD_RES 6: note = biphenylalanine
  MOD_RES 7: note = Beta-alanine
  MOD_RES 8: note = d-Cysteine
  REGION 2..8: note = cyclical region
  CROSSLNK 2..8: note = Cys-dCys bond
  MOD_RES 9: note = NH2
FCHYRXACT

SEQ ID NO: 85 - protein, 8 aa, synthetic construct
  REGION 1..8: note = Description of sequence: MC4R agonist
  MOD_RES 1: note = Nle
  MOD_RES 4: note = d-Phenylalanine
  MOD_RES 7: note = 5-aminopentanoic acid (HN-(CH2)4-C(O)
  REGION 2..8: note = cyclical region
  CROSSLNK 2..8: note = Cys-Cys bond
  MOD_RES 8: note = NH2
XCHFRWXC

SEQ ID NO: 86 - protein, 8 aa, synthetic construct
  REGION 1..8: note = Description of sequence: MC4R agonist
  MOD_RES 1: note = Nle
  MOD_RES 3: note = d-Alanine
  MOD_RES 5: note = d-Phenylalanine
  REGION 2..8: note = cyclical region
  CROSSLNK 2..8: note = Asp-Lys bond
  MOD_RES <1: note = Acetylated
  MOD_RES 8: note = NH2
XDAHFRWK

SEQ ID NO: 87 - protein, 8 aa, synthetic construct
  REGION 1..8: note = Description of sequence: MC4R agonist
  MOD_RES 1: note = Nle
  MOD_RES 3: note = d-Alanine
  MOD_RES 5: note = d-Phenylalanine
  MOD_RES 7: note = 3-benzothienylalanine
  REGION 2..8: note = cyclical region
  CROSSLNK 2..8: note = Asp-Lys bond
  MOD_RES <1: note = Acetylated
  MOD_RES 8: note = NH2
XDAHFRXK

SEQ ID NO: 88 - protein, 8 aa, synthetic construct
  REGION 1..8: note = Description of sequence: MC4R agonist
  MOD_RES 1: note = Nle
  MOD_RES 3: note = d-Alanine
  MOD_RES 5: note = d-Phenylalanine
  MOD_RES 8: note = Penicillamine
  REGION 2..8: note = cyclical region
  CROSSLNK 2..8: note = Cys-Pen bond
  MOD_RES <1: note = Acetylated
  MOD_RES 8: note = OH
XCAHFRWX

SEQ ID NO: 89 - protein, 8 aa, synthetic construct
  REGION 1..8: note = Description of sequence: MC4R agonist
  MOD_RES 1: note = Nle
  MOD_RES 3: note = dAbu
  MOD_RES 5: note = d-Phenylalanine
  REGION 2..8: note = cyclical region
  CROSSLNK 2..8: note = Cys-Cys bond
  MOD_RES <1: note = Acetylated
  MOD_RES 8: note = NH2
XCXHFRWC

SEQ ID NO: 90 - protein, 8 aa, synthetic construct
  REGION 1..8: note = Description of sequence: MC4R agonist
  MOD_RES 1: note = Nle
  MOD_RES 3: note = d-Valine
  MOD_RES 5: note = d-Phenylalanine
  REGION 2..8: note = cyclical region
  CROSSLNK 2..8: note = Cys-Cys bond
  MOD_RES <1: note = Acetylated
  MOD_RES 8: note = NH2
XCVHFRWC

SEQ ID NO: 91 - protein, 8 aa, synthetic construct
  REGION 1..8: note = Description of sequence: MC4R agonist
  MOD_RES 1: note = Nle
  MOD_RES 3: note = dIle
  MOD_RES 5: note = d-Phenylalanine
  REGION 2..8: note = cyclical region
  CROSSLNK 2..8: note = Cys-Cys bond
  MOD_RES <1: note = Acetylated
  MOD_RES 8: note = NH2
XCIHFRWC

SEQ ID NO: 92 - protein, 8 aa, synthetic construct
  REGION 1..8: note = Description of sequence: MC4R agonist
  MOD_RES 1: note = Nle
  MOD_RES 3: note = d-Leucine
  MOD_RES 5: note = d-Phenylalanine
  REGION 2..8: note = cyclical region
  CROSSLNK 2..8: note = Cys-Cys bond
  MOD_RES <1: note = Acetylated
  MOD_RES 8: note = NH2
XCLHFRWC

SEQ ID NO: 93 - protein, 8 aa, synthetic construct
  REGION 1..8: note = Description of sequence: MC4R agonist
  MOD_RES 1: note = Nle
  MOD_RES 3: note = dTle
  MOD_RES 5: note = d-Phenylalanine
  REGION 2..8: note = cyclical region
  CROSSLNK 2..8: note = Cys-Cys bond
  MOD_RES <1: note = Acetylated
  MOD_RES 8: note = NH2
XCLHFRWC

SEQ ID NO: 94 - protein, 8 aa, synthetic construct
  REGION 1..8: note = Description of sequence: MC4R agonist
  MOD_RES 1: note = Nle
  MOD_RES 3: note = d-beta-cyclohexylalanine
  MOD_RES 5: note = d-Phenylalanine
  REGION 2..8: note = cyclical region
  CROSSLNK 2..8: note = Cys-Cys bond
  MOD_RES <1: note = Acetylated
  MOD_RES 8: note = NH2
XCXHFRWC

SEQ ID NO: 95 - protein, 8 aa, synthetic construct
  REGION 1..8: note = Description of sequence: MC4R agonist
  MOD_RES 1: note = Nle
  MOD_RES 2: note = Penicillamine
  MOD_RES 4: note = d-Phenylalanine
  MOD_RES 7: note = 4Abu
  REGION 2..8: note = cyclical region
  CROSSLNK 2..8: note = Pen-Cys bond
  MOD_RES <1: note = Acetylated
  MOD_RES 8: note = NH2
XXHFRWXC

SEQ ID NO: 96 - protein, 8 aa, synthetic construct
  REGION 1..8: note = Description of sequence: MC4R agonist
  MOD_RES 1: note = Nle
  MOD_RES 4: note = d-Phenylalanine
  MOD_RES 7: note = 4Abu
  MOD_RES 8: note = Penicillamine
  REGION 2..8: note = cyclical region
  CROSSLNK 2..8: note = Cys-Pen bond
  MOD_RES <1: note = Acetylated
  MOD_RES 8: note = NH2
XCHFRWXX

SEQ ID NO: 97 - protein, 8 aa, synthetic construct
  REGION 1..8: note = Description of sequence: MC4R agonist
  MOD_RES 1: note = Nle
  MOD_RES 2: note = Penicillamine
  MOD_RES 4: note = d-Phenylalanine
  MOD_RES 7: note = 4Abu
  MOD_RES 8: note = Penicillamine
  REGION 2..8: note = cyclical region
  CROSSLNK 2..8: note = Pen-Pen bond
  MOD_RES <1: note = Acetylated
  MOD_RES 8: note = NH2
XXHFRWXX

SEQ ID NO: 98 - protein, 8 aa, synthetic construct
  REGION 1..8: note = Description of sequence: MC4R agonist
  MOD_RES 4: note = d-Phenylalanine
  MOD_RES 7: note = 4Abu
  REGION 2..8: note = cyclical region
  CROSSLNK 2..8: note = Cys-Cys bond
  MOD_RES <1: note = Acetylated
  MOD_RES 8: note = NH2
LCHFRWXC

SEQ ID NO: 99 - protein, 8 aa, synthetic construct
  REGION 1..8: note = Description of sequence: MC4R agonist
  MOD_RES 1: note = beta-cyclohexylalanine
  MOD_RES 4: note = d-Phenylalanine
  MOD_RES 7: note = 4Abu
  REGION 2..8: note = cyclical region
  CROSSLNK 2..8: note = Cys-Cys bond
  MOD_RES <1: note = Acetylated
  MOD_RES 8: note = NH2
XCHFRWXC

SEQ ID NO: 100 - protein, 8 aa, synthetic construct
  REGION 1..8: note = Description of sequence: MC4R agonist
  MOD_RES 4: note = d-Phenylalanine
  MOD_RES 7: note = 4Abu
  REGION 2..8: note = cyclical region
  CROSSLNK 2..8: note = Cys-Cys bond
  MOD_RES <1: note = Acetylated
  MOD_RES 8: note = NH2
ICHFRWXC

SEQ ID NO: 101 - protein, 8 aa, synthetic construct
  REGION 1..8: note = Description of sequence: MC4R agonist
  MOD_RES 4: note = d-Phenylalanine
  MOD_RES 7: note = 4Abu
  REGION 2..8: note = cyclical region
  CROSSLNK 2..8: note = Cys-Cys bond
  MOD_RES <1: note = Acetylated
  MOD_RES 8: note = NH2
FCHFRWXC

SEQ ID NO: 102 - protein, 8 aa, synthetic construct
  REGION 1..8: note = Description of sequence: MC4R agonist
  MOD_RES 4: note = d-Phenylalanine
  MOD_RES 7: note = 4Abu
  REGION 2..8: note = cyclical region
  CROSSLNK 2..8: note = Cys-Cys bond
  MOD_RES <1: note = Acetylated
  MOD_RES 8: note = NH2
VCHFRWXC

SEQ ID NO: 103 - protein, 8 aa, synthetic construct
  REGION 1..8: note = Description of sequence: MC4R agonist
  MOD_RES 1: note = beta-(2-naphthyl)alanine
  MOD_RES 4: note = d-Phenylalanine
  MOD_RES 7: note = 4Abu
  REGION 2..8: note = cyclical region
  CROSSLNK 2..8: note = Cys-Cys bond
  MOD_RES <1: note = Acetylated
  MOD_RES 8: note = NH2
XCHFRWXC

SEQ ID NO: 104 - protein, 8 aa, synthetic construct
  REGION 1..8: note = Description of sequence: MC4R agonist
  MOD_RES 1: note = Nle
  MOD_RES 4: note = d-Phenylalanine
  MOD_RES 7: note = 4Abu
  REGION 2..8: note = cyclical region
  CROSSLNK 2..8: note = Cys-Cys bond
  MOD_RES 8: note = NH2
XCHFRWXC

SEQ ID NO: 105 - protein, 8 aa, synthetic construct
  REGION 1..8: note = Description of sequence: MC4R agonist
  MOD_RES 4: note = d-Phenylalanine
  MOD_RES 7: note = 4Abu
  REGION 2..8: note = cyclical region
  CROSSLNK 2..8: note = Cys-Cys bond
  MOD_RES 8: note = NH2
FCHFRWXC

SEQ ID NO: 106 - protein, 8 aa, synthetic construct
  REGION 1..8: note = Description of sequence: MC4R agonist
  MOD_RES 1: note = Nle
  MOD_RES 3: note = (3-pyridiyl)alanine
  MOD_RES 4: note = d-Phenylalanine
  MOD_RES 7: note = 4Abu
  REGION 2..8: note = cyclical region
  CROSSLNK 2..8: note = Cys-Cys bond
  MOD_RES <1: note = Acetylated
  MOD_RES 8: note = NH2
XCXFRWXC

SEQ ID NO: 107 - protein, 8 aa, synthetic construct
  REGION 1..8: note = Description of sequence: MC4R agonist
  MOD_RES 1: note = Nle
  MOD_RES 3: note = d-Alanine
  MOD_RES 5: note = d-Phenylalanine
  REGION 2..8: note = cyclical region
  CROSSLNK 2..8: note = Cys-Cys bond
  MOD_RES <1: note = Acetylated
  MOD_RES 8: note = OH
XCAHFRWC

SEQ ID NO: 108 - protein, 8 aa, synthetic construct
  REGION 1..8: note = Description of sequence: MC4R agonist
  MOD_RES 1: note = Nle
  MOD_RES 6: note = d-Tryptophan
  MOD_RES 7: note = 4Abu
  REGION 2..8: note = cyclical region
  CROSSLNK 2..8: note = Cys-Cys bond
  MOD_RES <1: note = Acetylated
  MOD_RES 8: note = NH2
XCHFRWXC

SEQ ID NO: 109 - protein, 8 aa, synthetic construct
  REGION 1..8: note = Description of sequence: MC4R agonist
  MOD_RES 1: note = Nle
  MOD_RES 4: note = d-beta-(2-naphthyl)alanine
  REGION 2..8: note = cyclical region
  CROSSLNK 2..8: note = Asp-Lys bond
  MOD_RES <1: note = Acetylated
  MOD_RES 8: note = NH2
XDHXRWAK

SEQ ID NO: 110 - protein, 8 aa, synthetic construct
  REGION 1..8: note = Description of sequence: MC4R agonist
  MOD_RES 1: note = Nle
  MOD_RES 4: note = d-beta-(2-naphthyl)alanine
  MOD_RES 7: note = Beta-alanine
  REGION 2..8: note = cyclical region
  CROSSLNK 2..8: note = Asp-Lys bond
  MOD_RES <1: note = Acetylated
  MOD_RES 8: note = NH2
XDHXRWAK

SEQ ID NO: 111 - protein, 8 aa, synthetic construct
  REGION 1..8: note = Description of sequence: MC4R agonist
  MOD_RES 1: note = Nle
  MOD_RES 4: note = d-beta-(2-naphthyl)alanine
  MOD_RES 7: note = 4Abu
  REGION 2..8: note = cyclical region
  CROSSLNK 2..8: note = Cys-Cys bond
  MOD_RES <1: note = Acetylated
  MOD_RES 8: note = NH2
XCHXRWXC

SEQ ID NO: 112 - protein, 8 aa, synthetic construct
  REGION 1..8: note = Description of sequence: MC4R agonist
  MOD_RES 1: note = Nle
  MOD_RES 4: note = d-beta-(2-naphthyl)alanine
  MOD_RES 7: note = 6-aminohexanoic acid
  REGION 2..8: note = cyclical region
  CROSSLNK 2..8: note = Cys-Cys bond
  MOD_RES <1: note = Acetylated
  MOD_RES 8: note = NH2
XCHXRWXC

SEQ ID NO: 113 - protein, 8 aa, synthetic construct
  REGION 1..8: note = Description of sequence: MC4R agonist
  MOD_RES 1: note = homophenylalanine
  MOD_RES 4: note = d-beta-(2-naphthyl)alanine
  MOD_RES 7: note = 4Abu
  REGION 2..8: note = cyclical region
  CROSSLNK 2..8: note = Asp-Lys bond
  MOD_RES <1: note = Acetylated
  MOD_RES 8: note = NH2
FDHXRWXK

SEQ ID NO: 114 - protein, 8 aa, synthetic construct
  REGION 1..8: note = Description of sequence: MC4R agonist
  MOD_RES 1: note = beta-cyclohexylalanine
  MOD_RES 4: note = d-beta-(2-naphthyl)alanine
  MOD_RES 7: note = 4Abu
  REGION 2..8: note = cyclical region
  CROSSLNK 2..8: note = Asp-Lys bond
  MOD_RES <1: note = Acetylated
  MOD_RES 8: note = NH2
XDHXRWXK

SEQ ID NO: 115 - protein, 8 aa, synthetic construct
  REGION 1..8: note = Description of sequence: MC4R agonist
  MOD_RES 1: note = Nle
  MOD_RES 4: note = d-Phenylalanine
  MOD_RES 7: note = Beta-alanine
  REGION 2..8: note = cyclical region
  CROSSLNK 2..8: note = Asp-Lys bond
  MOD_RES <1: note = Acetylated
  MOD_RES 8: note = OH
XDHFRWAK

SEQ ID NO: 116 - protein, 8 aa, synthetic construct
  REGION 1..8: note = Description of sequence: MC4R agonist
  MOD_RES 1: note = Nle
  MOD_RES 4: note = d-Phenylalanine
  MOD_RES 7: note = 6-aminohexanoic acid
  REGION 2..8: note = cyclical region
  CROSSLNK 2..8: note = Cys-Cys bond
  MOD_RES <1: note = Acetylated
  MOD_RES 8: note = OH
XCHFRWXC

SEQ ID NO: 117 - protein, 9 aa, synthetic construct
  REGION 1..9: note = Description of sequence: MC4R agonist
  MOD_RES 1: note = d-Phenylalanine
  MOD_RES 4: note = d-Phenylalanine
  MOD_RES 8: note = d-Cysteine
  REGION 2..8: note = cyclical region
  CROSSLNK 2..8: note = Cys-dCys bond
  MOD_RES 9: note = OH
FCHFRWACT

SEQ ID NO: 118 - protein, 9 aa, synthetic construct
  REGION 1..9: note = Description of sequence: MC4R agonist
  MOD_RES 1: note = d-Phenylalanine
  MOD_RES 4: note = d-Phenylalanine
  MOD_RES 7: note = Beta-alanine
  MOD_RES 8: note = d-Cysteine
  REGION 2..8: note = cyclical region
  CROSSLNK 2..8: note = Cys-dCys bond
  MOD_RES 9: note = OH
FCHFRWACT

SEQ ID NO: 119 - protein, 9 aa, synthetic construct
  REGION 1..9: note = Description of sequence: MC4R agonist
  MOD_RES 1: note = d-Phenylalanine
  MOD_RES 4: note = d-Phenylalanine
  MOD_RES 7: note = 4Abu
  MOD_RES 8: note = d-Cysteine
  REGION 2..8: note = cyclical region
  CROSSLNK 2..8: note = Cys-dCys bond
  MOD_RES 9: note = OH
FCHFRWXCT

SEQ ID NO: 120 - protein, 8 aa, synthetic construct
  REGION 1..8: note = Description of sequence: MC4R agonist
  MOD_RES 1: note = Nle
  MOD_RES 4: note = d-Phenylalanine
  MOD_RES 7: note = 5-aminopentanoic acid (HN-(CH2)4-C(O)
  REGION 2..8: note = cyclical region
  CROSSLNK 2..8: note = Cys-Cys bond
  MOD_RES <1: note = Acetylated
  MOD_RES 8: note = OH
XCHFRWXC

SEQ ID NO: 121 - protein, 8 aa, synthetic construct
  REGION 1..8: note = Description of sequence: MC4R agonist
  MOD_RES 1: note = Nle
  MOD_RES 4: note = d-Phenylalanine
  MOD_RES 7: note = 5-aminopentanoic acid (HN-(CH2)4-C(O)
  REGION 2..8: note = cyclical region
  CROSSLNK 2..8: note = Asp-Lys bond
  MOD_RES <1: note = Acetylated
  MOD_RES 8: note = OH
XDHFRWXK

SEQ ID NO: 122 - protein, 8 aa, synthetic construct
  REGION 1..8: note = Description of sequence: MC4R agonist
  MOD_RES 1: note = beta-cyclohexylalanine
  MOD_RES 4: note = d-Phenylalanine
  MOD_RES 7: note = 4Abu
  REGION 2..8: note = cyclical region
  CROSSLNK 2..8: note = Asp-Lys bond
  MOD_RES <1: note = Acetylated
  MOD_RES 8: note = OH
XDHFRWXK

SEQ ID NO: 123 - protein, 8 aa, synthetic construct
  REGION 1..8: note = Description of sequence: MC4R agonist
  MOD_RES 1: note = Nle
  MOD_RES 4: note = d-Phenylalanine
  MOD_RES 7: note = 4Abu
  REGION 2..8: note = cyclical region
  CROSSLNK 2..8: note = Asp-Lys bond
  MOD_RES <1: note = Acetylated
  MOD_RES 8: note = OH
XDHFRWXK

SEQ ID NO: 124 - protein, 8 aa, synthetic construct
  REGION 1..8: note = Description of sequence: MC4R agonist
  MOD_RES 1: note = Cyclohexylglycine
  MOD_RES 4: note = d-Phenylalanine
  MOD_RES 7: note = 4Abu
  REGION 2..8: note = cyclical region
  CROSSLNK 2..8: note = Asp-Lys bond
  MOD_RES <1: note = Acetylated
  MOD_RES 8: note = OH
XDHFRWXK

SEQ ID NO: 125 - protein, 8 aa, synthetic construct
  REGION 1..8: note = Description of sequence: MC4R agonist
  MOD_RES 1: note = d-beta-cyclohexylalanine
  MOD_RES 4: note = d-Phenylalanine
  MOD_RES 7: note = 4Abu
  REGION 2..8: note = cyclical region
  CROSSLNK 2..8: note = Asp-Lys bond
  MOD_RES <1: note = Acetylated
  MOD_RES 8: note = OH
XDHFRWXK

SEQ ID NO: 126 - protein, 8 aa, synthetic construct
  REGION 1..8: note = Description of sequence: MC4R agonist
  MOD_RES 1: note = hbeta-cyclohexylalanine
  MOD_RES 4: note = d-Phenylalanine
  MOD_RES 7: note = 4Abu
  REGION 2..8: note = cyclical region
  CROSSLNK 2..8: note = Asp-Lys bond
  MOD_RES <1: note = Acetylated
  MOD_RES 8: note = OH
XDHFRWXK

SEQ ID NO: 127 - protein, 8 aa, synthetic construct
  REGION 1..8: note = Description of sequence: MC4R agonist
  MOD_RES 1: note = dCyclohexylglycine
  MOD_RES 4: note = d-Phenylalanine
  MOD_RES 7: note = 4Abu
  REGION 2..8: note = cyclical region
  CROSSLNK 2..8: note = Asp-Lys bond
  MOD_RES <1: note = Acetylated
  MOD_RES 8: note = OH
XDHFRWXK

SEQ ID NO: 128 - protein, 8 aa, synthetic construct
  REGION 1..8: note = Description of sequence: MC4R agonist
  MOD_RES 1: note = homophenylalanine
  MOD_RES 4: note = d-Phenylalanine
  MOD_RES 7: note = 4Abu
  REGION 2..8: note = cyclical region
  CROSSLNK 2..8: note = Asp-Lys bond
  MOD_RES <1: note = Acetylated
  MOD_RES 8: note = OH
FDHFRWXK

SEQ ID NO: 129 - protein, 8 aa, synthetic construct
  REGION 1..8: note = Description of sequence: MC4R agonist
  MOD_RES 1: note = Nle
  MOD_RES 4: note = d-Phenylalanine
  MOD_RES 6: note = d-Tryptophan
  MOD_RES 7: note = 4Abu
  REGION 2..8: note = cyclical region
  CROSSLNK 2..8: note = Cys-Cys bond
  MOD_RES <1: note = Acetylated
  MOD_RES 8: note = OH
XCHFRWXC

SEQ ID NO: 130 - protein, 8 aa, synthetic construct
  REGION 1..8: note = Description of sequence: MC4R agonist
  MOD_RES 1: note = Nle
  MOD_RES 4: note = d-Phenylalanine
  MOD_RES 6: note = d-Tryptophan
  MOD_RES 7: note = 6-aminohexanoic acid
  REGION 2..8: note = cyclical region
  CROSSLNK 2..8: note = Cys-Cys bond
  MOD_RES <1: note = Acetylated
  MOD_RES 8: note = OH
XCHFRWXC

SEQ ID NO: 131 - protein, 8 aa, synthetic construct
  REGION 1..8: note = Description of sequence: MC4R agonist
  MOD_RES 1: note = Nle
  MOD_RES 4: note = d-Phenylalanine
  MOD_RES 6: note = d-Tryptophan
  MOD_RES 7: note = Beta-alanine
  REGION 2..8: note = cyclical region
  CROSSLNK 2..8: note = Cys-Cys bond
  MOD_RES <1: note = Acetylated
  MOD_RES 8: note = OH
XCHFRWAC

SEQ ID NO: 132 - protein, 8 aa, synthetic construct
  REGION 1..8: note = Description of sequence: MC4R agonist
  MOD_RES 1: note = Nle
  MOD_RES 4: note = d-Phenylalanine
  MOD_RES 6: note = d-Tryptophan
  MOD_RES 7: note = d-Alanine
  REGION 2..8: note = cyclical region
  CROSSLNK 2..8: note = Cys-Cys bond
  MOD_RES <1: note = Acetylated
  MOD_RES 8: note = OH
XCHFRWAC

SEQ ID NO: 133 - protein, 8 aa, synthetic construct
  REGION 1..8: note = Description of sequence: MC4R agonist
  MOD_RES 1: note = Nle
  MOD_RES 3: note = d-Alanine
  MOD_RES 5: note = d-beta-(2-naphthyl)alanine
  REGION 2..8: note = cyclical region
  CROSSLNK 2..8: note = Cys-Cys bond
  MOD_RES <1: note = Acetylated
  MOD_RES 8: note = OH
XCAHXRWC

SEQ ID NO: 134 - protein, 8 aa, synthetic construct
  REGION 1..8: note = Description of sequence: MC4R agonist
  MOD_RES 1: note = Nle
  MOD_RES 3: note = d-Alanine
  MOD_RES 5: note = d-beta-(2-naphthyl)alanine
  MOD_RES 7: note = beta-(2-naphthyl)alanine
  REGION 2..8: note = cyclical region
  CROSSLNK 2..8: note = Cys-Cys bond
  MOD_RES <1: note = Acetylated
  MOD_RES 8: note = OH
XCAHXRXC

SEQ ID NO: 135 - protein, 8 aa, synthetic construct
  REGION 1..8: note = Description of sequence: MC4R agonist
  MOD_RES 1: note = Nle
  MOD_RES 3: note = d-Alanine
  MOD_RES 5: note = d-beta-(2-naphthyl)alanine
  MOD_RES 7: note = beta-(1-naphthyl)alanine
  REGION 2..8: note = cyclical region
  CROSSLNK 2..8: note = Cys-Cys bond
  MOD_RES <1: note = Acetylated
  MOD_RES 8: note = OH
XCAHXRXC

SEQ ID NO: 136 - protein, 8 aa, synthetic construct
  REGION 1..8: note = Description of sequence: MC4R agonist
  MOD_RES 1: note = Nle
  MOD_RES 3: note = d-Alanine
  MOD_RES 5: note = d-beta-(2-naphthyl)alanine
  MOD_RES 7: note = 3-benzothienylalanine
  REGION 2..8: note = cyclical region
  CROSSLNK 2..8: note = Cys-Cys bond
  MOD_RES <1: note = Acetylated
  MOD_RES 8: note = OH
XCAHXRXC

SEQ ID NO: 137 - protein, 8 aa, synthetic construct
  REGION 1..8: note = Description of sequence: MC4R agonist
  MOD_RES 1: note = Nle
  MOD_RES 2: note = Penicillamine
  MOD_RES 3: note = d-Alanine
  MOD_RES 5: note = d-Phenylalanine
  REGION 2..8: note = cyclical region
  CROSSLNK 2..8: note = Pen-Cys bond
  MOD_RES <1: note = Acetylated
  MOD_RES 8: note = OH
XXAHFRWC

SEQ ID NO: 138 - protein, 8 aa, synthetic construct
  REGION 1..8: note = Description of sequence: MC4R agonist
  MOD_RES 1: note = Nle
  MOD_RES 4: note = d-Phenylalanine
  MOD_RES 7: note = 4Abu
  MOD_RES 8: note = Penicillamine
  REGION 2..8: note = cyclical region
  CROSSLNK 2..8: note = Cys-Pen bond
  MOD_RES <1: note = Acetylated
  MOD_RES 8: note = OH
XCHFRWXX

SEQ ID NO: 139 - protein, 8 aa, synthetic construct
  REGION 1..8: note = Description of sequence: MC4R agonist
  MOD_RES 3: note = d-Alanine
  MOD_RES 5: note = d-beta-(2-naphthyl)alanine
  REGION 2..8: note = cyclical region
  CROSSLNK 2..8: note = Cys-Cys bond
  MOD_RES <1: note = Acetylated
  MOD_RES 8: note = NH2
RCAHXRWC

SEQ ID NO: 140 - protein, 8 aa, synthetic construct
  REGION 1..8: note = Description of sequence: MC4R agonist
  MOD_RES 3: note = d-Alanine
  MOD_RES 5: note = d-Phenylalanine
  REGION 2..8: note = cyclical region
  CROSSLNK 2..8: note = Cys-Cys bond
  MOD_RES <1: note = Acetylated
  MOD_RES 8: note = NH2
RCAHFRWC

SEQ ID NO: 141 - protein, 8 aa, synthetic construct
  REGION 1..8: note = Description of sequence: MC4R agonist
  MOD_RES 1: note = d-Arginine
  MOD_RES 3: note = d-Alanine
  MOD_RES 5: note = d-Phenylalanine
  REGION 2..8: note = cyclical region
  CROSSLNK 2..8: note = Cys-Cys bond
  MOD_RES <1: note = Acetylated
  MOD_RES 8: note = NH2
RCAHFRWC

SEQ ID NO: 142 - protein, 8 aa, synthetic construct
  REGION 1..8: note = Description of sequence: MC4R agonist
  MOD_RES 1: note = d-Arginine
  MOD_RES 3: note = d-Alanine
  MOD_RES 5: note = d-Phenylalanine
  MOD_RES 8: note = Penicillamine
  REGION 2..8: note = cyclical region
  CROSSLNK 2..8: note = Cys-Pen bond
  MOD_RES <1: note = Acetylated
  MOD_RES 8: note = NH2
RCAHFRWX

SEQ ID NO: 143 - protein, 8 aa, synthetic construct
  REGION 1..8: note = Description of sequence: MC4R agonist
  MOD_RES 1: note = d-Arginine
  MOD_RES 4: note = d-Phenylalanine
  MOD_RES 7: note = 4Abu
  MOD_RES 8: note = Penicillamine
  REGION 2..8: note = cyclical region
  CROSSLNK 2..8: note = Cys-Pen bond
  MOD_RES <1: note = Acetylated
  MOD_RES 8: note = NH2
RCHFRWXX

SEQ ID NO: 144 - protein, 8 aa, synthetic construct
  REGION 1..8: note = Description of sequence: MC4R agonist
  MOD_RES 4: note = d-Phenylalanine
  MOD_RES 7: note = 4Abu
  MOD_RES 8: note = Penicillamine
  REGION 2..8: note = cyclical region
  CROSSLNK 2..8: note = Cys-Pen bond
  MOD_RES <1: note = Acetylated
  MOD_RES 8: note = NH2
RCHFRWXX

SEQ ID NO: 145 - protein, 8 aa, synthetic construct
  REGION 1..8: note = Description of sequence: MC4R agonist
  MOD_RES 3: note = d-Alanine
  MOD_RES 5: note = d-Phenylalanine
  MOD_RES 8: note = Penicillamine
  REGION 2..8: note = cyclical region
  CROSSLNK 2..8: note = Cys-Pen bond
  MOD_RES <1: note = Acetylated
  MOD_RES 8: note = NH2
RCAHFRWX

SEQ ID NO: 146 - protein, 8 aa, synthetic construct
  REGION 1..8: note = Description of sequence: MC4R agonist
  MOD_RES 1: note = d-Arginine
  MOD_RES 4: note = d-Phenylalanine
  REGION 2..8: note = cyclical region
  CROSSLNK 2..8: note = Asp-Lys bond
  MOD_RES <1: note = Acetylated
  MOD_RES 8: note = NH2
RDHFRWAK

SEQ ID NO: 147 - protein, 8 aa, synthetic construct
  REGION 1..8: note = Description of sequence: MC4R agonist
  MOD_RES 4: note = d-Phenylalanine
  REGION 2..8: note = cyclical region
  CROSSLNK 2..8: note = Asp-Lys bond
  MOD_RES <1: note = Acetylated
  MOD_RES 8: note = NH2
RDHFRWAK

SEQ ID NO: 148 - protein, 9 aa, synthetic construct
  REGION 1..9: note = Description of sequence: MC4R agonist
  MOD_RES 1: note = Hydantoin(O)(Arg
  MOD_RES 2: note = Gly
  MOD_RES 6: note = d-Phenylalanine
  REGION 3..9: note = cyclical region
  DISULFID 3..9: note = Cys-Cys bond
  MOD_RES 9: note = NH2
RGCEHFRWC

SEQ ID NO: 149 - protein, 9 aa, synthetic construct
  REGION 1..9: note = Description of sequence: MC4R agonist
  MOD_RES 1: note = Hydantoin(O)(Nle
  MOD_RES 2: note = Gly
  MOD_RES 6: note = d-Phenylalanine
  REGION 3..9: note = cyclical region
  DISULFID 3..9: note = Cys-Cys bond
  MOD_RES 9: note = NH2
XGCEHFRWC

SEQ ID NO: 150 - protein, 9 aa, synthetic construct
  REGION 1..9: note = Description of sequence: MC4R agonist
  MOD_RES 1: note = Hydantoin(O)(Gly
  MOD_RES 2: note = Gly
  MOD_RES 6: note = d-Phenylalanine
  REGION 3..9: note = cyclical region
  DISULFID 3..9: note = Cys-Cys bond
  MOD_RES 9: note = NH2
GGCEHFRWC

SEQ ID NO: 151 - protein, 9 aa, synthetic construct
  REGION 1..9: note = Description of sequence: MC4R agonist
  MOD_RES 1: note = Hydantoin(O)(Nle
  MOD_RES 2: note = Gly
  MOD_RES 4: note = d-Alanine
  MOD_RES 6: note = d-Phenylalanine
  REGION 3..9: note = cyclical region
  DISULFID 3..9: note = Cys-Cys bond
  MOD_RES 9: note = NH2
XGCAHFRWC

SEQ ID NO: 152 - protein, 9 aa, synthetic construct
  REGION 1..9: note = Description of sequence: MC4R agonist
  MOD_RES 1: note = Hydantoin(O)(Gly
  MOD_RES 2: note = Gly
  MOD_RES 4: note = d-Alanine
  MOD_RES 6: note = d-Phenylalanine
  REGION 3..9: note = cyclical region
  DISULFID 3..9: note = Cys-Cys bond
  MOD_RES 9: note = NH2
GGCAHFRWC

SEQ ID NO: 153 - protein, 9 aa, synthetic construct
  REGION 1..9: note = Description of sequence: MC4R agonist
  MOD_RES 1: note = Hydantoin(O)(Nle
  MOD_RES 2: note = Gly
  MOD_RES 4: note = d-Alanine
  MOD_RES 6: note = d-Phenylalanine
  MOD_RES 9: note = Penicillamine
  REGION 3..9: note = cyclical region
  DISULFID 3..9: note = Cys-Pen bond
  MOD_RES 9: note = NH2
XGCAHFRWX

SEQ ID NO: 154 - protein, 9 aa, synthetic construct
  REGION 1..9: note = Description of sequence: MC4R agonist
  MOD_RES 1: note = Hydantoin(O)(Gly
  MOD_RES 2: note = Gly
  MOD_RES 4: note = d-Alanine
  MOD_RES 6: note = d-Phenylalanine
  MOD_RES 9: note = Penicillamine
  REGION 3..9: note = cyclical region
  DISULFID 3..9: note = Cys-Pen bond
  MOD_RES 9: note = NH2
GGCAHFRWX

SEQ ID NO: 155 - protein, 9 aa, synthetic construct
  REGION 1..9: note = Description of sequence: MC4R agonist
  MOD_RES 1: note = Hydantoin(O)(Ala
  MOD_RES 2: note = Gly
  MOD_RES 4: note = d-Alanine
  MOD_RES 6: note = d-Phenylalanine
  REGION 3..9: note = cyclical region
  DISULFID 3..9: note = Cys-Cys bond
  MOD_RES 9: note = NH2
AGCAHFRWC

SEQ ID NO: 156 - protein, 9 aa, synthetic construct
  REGION 1..9: note = Description of sequence: MC4R agonist
  MOD_RES 1: note = Hydantoin(O)(d-Alanine
  MOD_RES 2: note = Gly
  MOD_RES 4: note = d-Alanine
  MOD_RES 6: note = d-Phenylalanine
  REGION 3..9: note = cyclical region
  DISULFID 3..9: note = Cys-Cys bond
  MOD_RES 9: note = NH2
AGCAHFRWC

SEQ ID NO: 157 - protein, 9 aa, synthetic construct
  REGION 1..9: note = Description of sequence: MC4R agonist
  MOD_RES 1: note = Hydantoin(O)(alpha- aminoisobutyric acid
  MOD_RES 2: note = Gly
  MOD_RES 4: note = d-Alanine
  MOD_RES 6: note = d-Phenylalanine
  REGION 3..9: note = cyclical region
  DISULFID 3..9: note = Cys-Cys bond
  MOD_RES 9: note = NH2
XGCAHFRWC

SEQ ID NO: 158 - protein, 9 aa, synthetic construct
  REGION 1..9: note = Description of sequence: MC4R agonist
  MOD_RES 1: note = Hydantoin(O)(Val
  MOD_RES 2: note = Gly
  MOD_RES 4: note = d-Alanine
  MOD_RES 6: note = d-Phenylalanine
  REGION 3..9: note = cyclical region
  DISULFID 3..9: note = Cys-Cys bond
  MOD_RES 9: note = NH2
VGCAHFRWC

SEQ ID NO: 159 - protein, 9 aa, synthetic construct
  REGION 1..9: note = Description of sequence: MC4R agonist
  MOD_RES 1: note = Hydantoin(O)(Ile
  MOD_RES 2: note = Gly
  MOD_RES 4: note = d-Alanine
  MOD_RES 6: note = d-Phenylalanine
  REGION 3..9: note = cyclical region
  DISULFID 3..9: note = Cys-Cys bond
  MOD_RES 9: note = NH2
IGCAHFRWC

SEQ ID NO: 160 - protein, 9 aa, synthetic construct
  REGION 1..9: note = Description of sequence: MC4R agonist
  MOD_RES 1: note = Hydantoin(O)(Leu
  MOD_RES 2: note = Gly
  MOD_RES 4: note = d-Alanine
  MOD_RES 6: note = d-Phenylalanine
  REGION 3..9: note = cyclical region
  DISULFID 3..9: note = Cys-Cys bond
  MOD_RES 9: note = NH2
LGCAHFRWC

SEQ ID NO: 161 - protein, 9 aa, synthetic construct
  REGION 1..9: note = Description of sequence: MC4R agonist
  MOD_RES 1: note = Hydantoin(O)(Gly
  MOD_RES 2: note = Gly
  MOD_RES 6: note = d-beta-(2-naphthyl)alanine
  REGION 3..9: note = cyclical region
  DISULFID 3..9: note = Cys-Cys bond
  MOD_RES 9: note = NH2
GGCEHXRWC

SEQ ID NO: 162 - protein, 9 aa, synthetic construct
  REGION 1..9: note = Description of sequence: MC4R agonist
  MOD_RES 1: note = Hydantoin(O)(Nle
  MOD_RES 2: note = Gly
  MOD_RES 6: note = d-beta-(2-naphthyl)alanine
  REGION 3..9: note = cyclical region
  DISULFID 3..9: note = Cys-Cys bond
  MOD_RES 9: note = NH2
XGCEHXRWC

SEQ ID NO: 163 - protein, 9 aa, synthetic construct
  REGION 1..9: note = Description of sequence: MC4R agonist
  MOD_RES 1: note = Hydantoin(O)(d-Arginine
  MOD_RES 2: note = Gly
  MOD_RES 6: note = d-Phenylalanine
  REGION 3..9: note = cyclical region
  DISULFID 3..9: note = Cys-Cys bond
  MOD_RES 9: note = NH2
RGCEHFRWC

SEQ ID NO: 164 - protein, 9 aa, synthetic construct
  REGION 1..9: note = Description of sequence: MC4R agonist
  MOD_RES 1: note = Hydantoin(O)(d-Arginine
  MOD_RES 2: note = Gly
  MOD_RES 4: note = d-Alanine
  MOD_RES 6: note = d-Phenylalanine
  REGION 3..9: note = cyclical region
  DISULFID 3..9: note = Cys-Cys bond
  MOD_RES 9: note = NH2
RGCAHFRWC

SEQ ID NO: 165 - protein, 9 aa, synthetic construct
  REGION 1..9: note = Description of sequence: MC4R agonist
  MOD_RES 1: note = Hydantoin(O)(Arg
  MOD_RES 2: note = Gly
  MOD_RES 4: note = d-Alanine
  MOD_RES 6: note = d-Phenylalanine
  REGION 3..9: note = cyclical region
  DISULFID 3..9: note = Cys-Cys bond
  MOD_RES 9: note = NH2
RGCAHFRWC

SEQ ID NO: 166 - protein, 9 aa, synthetic construct
  REGION 1..9: note = Description of sequence: MC4R agonist
  MOD_RES 1: note = Hydantoin(O)(d-Arginine
  MOD_RES 2: note = Gly
  MOD_RES 4: note = d-Alanine
  MOD_RES 6: note = d-beta-(2-naphthyl)alanine
  REGION 3..9: note = cyclical region
  DISULFID 3..9: note = Cys-Cys bond
  MOD_RES 9: note = NH2
RGCAHXRWC

SEQ ID NO: 167 - protein, 9 aa, synthetic construct
  REGION 1..9: note = Description of sequence: MC4R agonist
  MOD_RES 1: note = Hydantoin(O)(Arg
  MOD_RES 2: note = Gly
  MOD_RES 4: note = d-Alanine
  MOD_RES 6: note = d-beta-(2-naphthyl)alanine
  REGION 3..9: note = cyclical region
  DISULFID 3..9: note = Cys-Cys bond
  MOD_RES 9: note = NH2
RGCAHXRWC

SEQ ID NO: 168 - protein, 9 aa, synthetic construct
  REGION 1..9: note = Description of sequence: MC4R agonist
  MOD_RES 1: note = Hydantoin(O)(Ala
  MOD_RES 2: note = Nle
  MOD_RES 6: note = d-Phenylalanine
  REGION 3..9: note = cyclical region
  DISULFID 3..9: note = Cys-Cys bond
  MOD_RES 9: note = NH2
AXCEHFRWC

SEQ ID NO: 169 - protein, 9 aa, synthetic construct
  REGION 1..9: note = Description of sequence: MC4R agonist
  MOD_RES 1: note = Hydantoin(O)(Val
  MOD_RES 2: note = Nle
  MOD_RES 6: note = d-Phenylalanine
  REGION 3..9: note = cyclical region
  DISULFID 3..9: note = Cys-Cys bond
  MOD_RES 9: note = NH2
VXCEHFRWC

SEQ ID NO: 170 - protein, 9 aa, synthetic construct
  REGION 1..9: note = Description of sequence: MC4R agonist
  MOD_RES 1: note = Hydantoin(O)(Gly
  MOD_RES 2: note = Nle
  MOD_RES 6: note = d-Phenylalanine
  REGION 3..9: note = cyclical region
  DISULFID 3..9: note = Cys-Cys bond
  MOD_RES 9: note = NH2
GXCEHFRWC

SEQ ID NO: 171 - protein, 9 aa, synthetic construct
  REGION 1..9: note = Description of sequence: MC4R agonist
  MOD_RES 1: note = Hydantoin(O)(1-amino-1-cyclohexanecarboxylic acid
  MOD_RES 2: note = Nle
  MOD_RES 4: note = d-Alanine
  MOD_RES 6: note = d-Phenylalanine
  REGION 3..9: note = cyclical region
  DISULFID 3..9: note = Cys-Cys bond
  MOD_RES 9: note = NH2
XXCAHFRWC

SEQ ID NO: 172 - protein, 9 aa, synthetic construct
  REGION 1..9: note = Description of sequence: MC4R agonist
  MOD_RES 1: note = Hydantoin(O)(Gly
  MOD_RES 2: note = Nle
  MOD_RES 4: note = d-Alanine
  MOD_RES 6: note = d-Phenylalanine
  REGION 3..9: note = cyclical region
  DISULFID 3..9: note = Cys-Cys bond
  MOD_RES 9: note = NH2
GXCAHFRWC

SEQ ID NO: 173 - protein, 9 aa, synthetic construct
  REGION 1..9: note = Description of sequence: MC4R agonist
  MOD_RES 1: note = Hydantoin(O)(Ala
  MOD_RES 2: note = Nle
  MOD_RES 4: note = d-Alanine
  MOD_RES 6: note = d-Phenylalanine
  REGION 3..9: note = cyclical region
  DISULFID 3..9: note = Cys-Cys bond
  MOD_RES 9: note = NH2
AXCAHFRWC

SEQ ID NO: 174 - protein, 9 aa, synthetic construct
  REGION 1..9: note = Description of sequence: MC4R agonist
  MOD_RES 1: note = Hydantoin(O)(d-Alanine
  MOD_RES 2: note = Nle
  MOD_RES 4: note = d-Alanine
  MOD_RES 6: note = d-Phenylalanine
  REGION 3..9: note = cyclical region
  DISULFID 3..9: note = Cys-Cys bond
  MOD_RES 9: note = NH2
AXCAHFRWC

SEQ ID NO: 175 - protein, 9 aa, synthetic construct
  REGION 1..9: note = Description of sequence: MC4R agonist
  MOD_RES 1: note = Hydantoin(O)(Val
  MOD_RES 2: note = Nle
  MOD_RES 4: note = d-Alanine
  MOD_RES 6: note = d-Phenylalanine
  REGION 3..9: note = cyclical region
  DISULFID 3..9: note = Cys-Cys bond
  MOD_RES 9: note = NH2
VXCAHFRWC

SEQ ID NO: 176 - protein, 9 aa, synthetic construct
  REGION 1..9: note = Description of sequence: MC4R agonist
  MOD_RES 1: note = Hydantoin(O)(Leu
  MOD_RES 2: note = Nle
  MOD_RES 4: note = d-Alanine
  MOD_RES 6: note = d-Phenylalanine
  REGION 3..9: note = cyclical region
  DISULFID 3..9: note = Cys-Cys bond
  MOD_RES 9: note = NH2
LXCAHFRWC

SEQ ID NO: 177 - protein, 9 aa, synthetic construct
  REGION 1..9: note = Description of sequence: MC4R agonist
  MOD_RES 1: note = Hydantoin(O)(beta-cyclohexylalanine
  MOD_RES 2: note = Nle
  MOD_RES 4: note = d-Alanine
  MOD_RES 6: note = d-Phenylalanine
  REGION 3..9: note = cyclical region
  DISULFID 3..9: note = Cys-Cys bond
  MOD_RES 9: note = NH2
XXCAHFRWC

SEQ ID NO: 178 - protein, 9 aa, synthetic construct
  REGION 1..9: note = Description of sequence: MC4R agonist
  MOD_RES 1: note = Hydantoin(O)(alpha- aminoisobutyric acid
  MOD_RES 2: note = Nle
  MOD_RES 4: note = d-Alanine
  MOD_RES 6: note = d-Phenylalanine
  REGION 3..9: note = cyclical region
  DISULFID 3..9: note = Cys-Cys bond
  MOD_RES 9: note = NH2
XXCAHFRWC

SEQ ID NO: 179 - protein, 9 aa, synthetic construct
  REGION 1..9: note = Description of sequence: MC4R agonist
  MOD_RES 1: note = Hydantoin(O)(Gly
  MOD_RES 2: note = Arg
  MOD_RES 6: note = d-Phenylalanine
  REGION 3..9: note = cyclical region
  DISULFID 3..9: note = Cys-Cys bond
  MOD_RES 9: note = NH2
GRCEHFRWC

SEQ ID NO: 180 - protein, 9 aa, synthetic construct
  REGION 1..9: note = Description of sequence: MC4R agonist
  MOD_RES 1: note = Hydantoin(O)(Gly
  MOD_RES 2: note = Arg
  MOD_RES 6: note = d-beta-(2-naphthyl)alanine
  REGION 3..9: note = cyclical region
  DISULFID 3..9: note = Cys-Cys bond
  MOD_RES 9: note = NH2
GRCEHXRWC

SEQ ID NO: 181 - protein, 9 aa, synthetic construct
  REGION 1..9: note = Description of sequence: MC4R agonist
  MOD_RES 1: note = Hydantoin(O)(Gly
  MOD_RES 2: note = Arg
  MOD_RES 4: note = d-Alanine
  MOD_RES 6: note = d-Phenylalanine
  REGION 3..9: note = cyclical region
  DISULFID 3..9: note = Cys-Cys bond
  MOD_RES 9: note = NH2
GRCAHFRWC

SEQ ID NO: 182 - protein, 9 aa, synthetic construct
  REGION 1..9: note = Description of sequence: MC4R agonist
  MOD_RES 1: note = Hydantoin(O)(Gly
  MOD_RES 2: note = Arg
  MOD_RES 4: note = d-Alanine
  MOD_RES 6: note = d-beta-(2-naphthyl)alanine
  REGION 3..9: note = cyclical region
  DISULFID 3..9: note = Cys-Cys bond
  MOD_RES 9: note = NH2
GRCAHXRWC

SEQ ID NO: 183 - protein, 9 aa, synthetic construct
  REGION 1..9: note = Description of sequence: MC4R agonist
  MOD_RES 1: note = Hydantoin(O)(Gly
  MOD_RES 2: note = d-Arginine
  MOD_RES 6: note = d-Phenylalanine
  REGION 3..9: note = cyclical region
  DISULFID 3..9: note = Cys-Cys bond
  MOD_RES 9: note = NH2
GRCEHFRWC

SEQ ID NO: 184 - protein, 9 aa, synthetic construct
  REGION 1..9: note = Description of sequence: MC4R agonist
  MOD_RES 1: note = Hydantoin(O)(Gly
  MOD_RES 2: note = d-Arginine
  MOD_RES 4: note = d-Alanine
  MOD_RES 6: note = d-Phenylalanine
  REGION 3..9: note = cyclical region
  DISULFID 3..9: note = Cys-Cys bond
  MOD_RES 9: note = NH2
GRCAHFRWC

SEQ ID NO: 185 - protein, 9 aa, synthetic construct
  REGION 1..9: note = Description of sequence: MC4R agonist
  MOD_RES 1: note = Hydantoin(O)(Gly
  MOD_RES 2: note = d-Arginine
  MOD_RES 4: note = d-Alanine
  MOD_RES 6: note = d-beta-(2-naphthyl)alanine
  REGION 3..9: note = cyclical region
  DISULFID 3..9: note = Cys-Cys bond
  MOD_RES 9: note = NH2
GRCAHXRWC

SEQ ID NO: 186 - protein, 9 aa, synthetic construct
  REGION 1..9: note = Description of sequence: MC4R agonist
  MOD_RES 1: note = Hydantoin(O)(Nle
  MOD_RES 2: note = Ala
  MOD_RES 6: note = d-Phenylalanine
  REGION 3..9: note = cyclical region
  DISULFID 3..9: note = Cys-Cys bond
  MOD_RES 9: note = NH2
XACEHFRWC

SEQ ID NO: 187 - protein, 7 aa, synthetic construct
  REGION 1..7: note = Description of sequence: MC4R agonist
  MOD_RES 1: note = Hydantoin(O)(Cys
  MOD_RES 2: note = d-Alanine
  MOD_RES 4: note = d-Phenylalanine
  REGION 1..7: note = cyclical region
  DISULFID 1..7: note = Cys-Cys bond
  MOD_RES 7: note = NH2
CAHFRWC

SEQ ID NO: 188 - protein, 7 aa, synthetic construct
  REGION 1..7: note = Description of sequence: MC4R agonist
  MOD_RES 1: note = Hydantoin(O)(Homocysteine
  MOD_RES 2: note = d-Alanine
  MOD_RES 4: note = d-Phenylalanine
  REGION 1..7: note = cyclical region
  DISULFID 1..7: note = Cys-Cys bond
  MOD_RES 7: note = NH2
CAHFRWC

SEQ ID NO: 189 - protein, 7 aa, synthetic construct
  REGION 1..7: note = Description of sequence: MC4R agonist
  MOD_RES 1: note = Hydantoin(O)(Cys
  MOD_RES 2: note = d-Alanine
  MOD_RES 4: note = d-beta-(2-naphthyl)alanine
  REGION 1..7: note = cyclical region
  DISULFID 1..7: note = Cys-Cys bond
  MOD_RES 7: note = NH2
CAHXRWC

SEQ ID NO: 190 - protein, 7 aa, synthetic construct
  REGION 1..7: note = Description of sequence: MC4R agonist
  MOD_RES 1: note = Hydantoin(O)(Homocysteine
  MOD_RES 2: note = d-Alanine
  MOD_RES 4: note = d-beta-(2-naphthyl)alanine
  REGION 1..7: note = cyclical region
  DISULFID 1..7: note = Cys-Cys bond
  MOD_RES 7: note = NH2
CAHXRWC

SEQ ID NO: 191 - protein, 7 aa, synthetic construct
  REGION 1..7: note = Description of sequence: MC4R agonist
  MOD_RES 1: note = Hydantoin(O)(Asp
  MOD_RES 2: note = d-Alanine
  MOD_RES 4: note = d-Phenylalanine
  REGION 1..7: note = cyclical region
  CROSSLNK 1..7: note = Asp-Lys bond
  MOD_RES 7: note = NH2
DAHFRWK

SEQ ID NO: 192 - protein, 7 aa, synthetic construct
  REGION 1..7: note = Description of sequence: MC4R agonist
  MOD_RES 1: note = Hydantoin(O)(Asp
  MOD_RES 2: note = d-Alanine
  MOD_RES 4: note = d-Phenylalanine
  MOD_RES 7: note = Orn
  REGION 1..7: note = cyclical region
  CROSSLNK 1..7: note = Asp-Orn bond
  MOD_RES 7: note = NH2
DAHFRWX

SEQ ID NO: 193 - protein, 7 aa, synthetic construct
  REGION 1..7: note = Description of sequence: MC4R agonist
  MOD_RES 1: note = Hydantoin(O)(Asp
  MOD_RES 2: note = d-Alanine
  MOD_RES 4: note = d-Phenylalanine
  MOD_RES 7: note = Dab
  REGION 1..7: note = cyclical region
  CROSSLNK 1..7: note = Asp-Dab bond
  MOD_RES 7: note = NH2
DAHFRWX

SEQ ID NO: 194 - protein, 7 aa, synthetic construct
  REGION 1..7: note = Description of sequence: MC4R agonist
  MOD_RES 1: note = Hydantoin(O)(Asp
  MOD_RES 2: note = d-Alanine
  MOD_RES 4: note = d-Phenylalanine
  MOD_RES 7: note = 2,3-diaminopropionic acid
  REGION 1..7: note = cyclical region
  CROSSLNK 1..7: note = Asp-Dap bond
  MOD_RES 7: note = NH2
DAHFRWX

SEQ ID NO: 195 - protein, 6 aa, synthetic construct
  REGION 1..6: note = Description of sequence: MC4R agonist
  MOD_RES 1: note = Hydantoin(O)(Asp
  MOD_RES 2: note = His
  MOD_RES 3: note = d-beta-(2-naphthyl)alanine
  REGION 1..6: note = cyclical region
  CROSSLNK 1..6: note = Asp-Lys bond
  MOD_RES 6: note = NH2
DHXRWK

SEQ ID NO: 196 - protein, 6 aa, synthetic construct
  REGION 1..6: note = Description of sequence: MC4R agonist
  MOD_RES 1: note = Hydantoin(O)(Asp
  MOD_RES 2: note = His
  MOD_RES 3: note = d-Phenylalanine
  REGION 1..6: note = cyclical region
  CROSSLNK 1..6: note = Asp-Lys bond
  MOD_RES 6: note = NH2
DHFRWK

SEQ ID NO: 197 - protein, 6 aa, synthetic construct
  REGION 1..6: note = Description of sequence: MC4R agonist
  MOD_RES 1: note = Hydantoin(O)(Asp
  MOD_RES 2: note = 1-amino-1cyclopropanecarboxylic acid
  MOD_RES 3: note = d-Phenylalanine
  REGION 1..6: note = cyclical region
  CROSSLNK 1..6: note = Asp-Lys bond
  MOD_RES 6: note = NH2
DXFRWK

SEQ ID NO: 198 - protein, 6 aa, synthetic construct
  REGION 1..6: note = Description of sequence: MC4R agonist
  MOD_RES 1: note = Hydantoin(O)(Asp
  MOD_RES 2: note = 1-amino-1-cyclopentanecarboxylic acid
  MOD_RES 3: note = d-Phenylalanine
  REGION 1..6: note = cyclical region
  CROSSLNK 1..6: note = Asp-Lys bond
  MOD_RES 6: note = NH2
DXFRWK

SEQ ID NO: 199 - protein, 6 aa, synthetic construct
  REGION 1..6: note = Description of sequence: MC4R agonist
  MOD_RES 1: note = Hydantoin(O)(Asp
  MOD_RES 2: note = 1-amino-1-cyclohexanecarboxylic acid
  MOD_RES 3: note = d-Phenylalanine
  REGION 1..6: note = cyclical region
  CROSSLNK 1..6: note = Asp-Lys bond
  MOD_RES 6: note = NH2
DXFRWK

SEQ ID NO: 200 - protein, 6 aa, synthetic construct
  REGION 1..6: note = Description of sequence: MC4R agonist
  MOD_RES 1: note = Hydantoin(O)(Asp
  MOD_RES 2: note = 1-amino-1cyclopropanecarboxylic acid
  MOD_RES 3: note = d-beta-(2-naphthyl)alanine
  REGION 1..6: note = cyclical region
  CROSSLNK 1..6: note = Asp-Lys bond
  MOD_RES 6: note = NH2
DXXRWK

SEQ ID NO: 201 - protein, 6 aa, synthetic construct
  REGION 1..6: note = Description of sequence: MC4R agonist
  MOD_RES 1: note = Hydantoin(O)(Asp
  MOD_RES 2: note = 1-amino-1-cyclopentanecarboxylic acid
  MOD_RES 3: note = d-beta-(2-naphthyl)alanine
  REGION 1..6: note = cyclical region
  CROSSLNK 1..6: note = Asp-Lys bond
  MOD_RES 6: note = NH2
DXXRWK

SEQ ID NO: 202 - protein, 6 aa, synthetic construct
  REGION 1..6: note = Description of sequence: MC4R agonist
  MOD_RES 1: note = Hydantoin(O)(Asp
  MOD_RES 2: note = 1-amino-1-cyclohexanecarboxylic acid
  MOD_RES 3: note = d-beta-(2-naphthyl)alanine
  REGION 1..6: note = cyclical region
  CROSSLNK 1..6: note = Asp-Lys bond
  MOD_RES 6: note = NH2
DXXRWK

SEQ ID NO: 203 - protein, 6 aa, synthetic construct
  REGION 1..6: note = Description of sequence: MC4R agonist
  MOD_RES 1: note = Hydantoin(O)(Asp
  MOD_RES 2: note = 2-aminoindan-2-carboxylic acid
  MOD_RES 3: note = d-Phenylalanine
  REGION 1..6: note = cyclical region
  CROSSLNK 1..6: note = Asp-Lys bond
  MOD_RES 6: note = NH2
DXFRWK

SEQ ID NO: 204 - protein, 6 aa, synthetic construct
  REGION 1..6: note = Description of sequence: MC4R agonist
  MOD_RES 1: note = Hydantoin(O)(Asp
  MOD_RES 2: note = 4-aminopiperdine-4-carboxaldehyde
  MOD_RES 3: note = d-Phenylalanine
  REGION 1..6: note = cyclical region
  CROSSLNK 1..6: note = Asp-Lys bond
  MOD_RES 6: note = NH2
DXFRWK

SEQ ID NO: 205 - protein, 6 aa, synthetic construct
  REGION 1..6: note = Description of sequence: MC4R agonist
  MOD_RES 1: note = Hydantoin(O)(Asp
  MOD_RES 2: note = 2-aminoindan-2-carboxylic acid
  MOD_RES 3: note = d-beta-(2-naphthyl)alanine
  REGION 1..6: note = cyclical region
  CROSSLNK 1..6: note = Asp-Lys bond
  MOD_RES 6: note = NH2
DXXRWK

SEQ ID NO: 206 - protein, 6 aa, synthetic construct
  REGION 1..6: note = Description of sequence: MC4R agonist
  MOD_RES 1: note = Hydantoin(O)(Asp
  MOD_RES 2: note = 4-aminopiperdine-4-carboxaldehyde
  MOD_RES 3: note = d-beta-(2-naphthyl)alanine
  REGION 1..6: note = cyclical region
  CROSSLNK 1..6: note = Asp-Lys bond
  MOD_RES 6: note = NH2
DXXRWK

SEQ ID NO: 207 - protein, 7 aa, synthetic construct
  REGION 1..7: note = Description of sequence: MC4R agonist
  MOD_RES 1: note = Hydantoin(O)(Glu
  MOD_RES 2: note = d-Alanine
  MOD_RES 4: note = d-Phenylalanine
  MOD_RES 7: note = Orn
  REGION 1..7: note = cyclical region
  CROSSLNK 1..7: note = Glu-Orn bond
  MOD_RES 7: note = NH2
EAHFRWX

SEQ ID NO: 208 - protein, 7 aa, synthetic construct
  REGION 1..7: note = Description of sequence: MC4R agonist
  MOD_RES 1: note = Hydantoin(O)(Glu
  MOD_RES 2: note = d-Alanine
  MOD_RES 4: note = d-Phenylalanine
  MOD_RES 7: note = Dab
  REGION 1..7: note = cyclical region
  CROSSLNK 1..7: note = Glu-Dab bond
  MOD_RES 7: note = NH2
EAHFRWX

SEQ ID NO: 209 - protein, 7 aa, synthetic construct
  REGION 1..7: note = Description of sequence: MC4R agonist
  MOD_RES 1: note = Hydantoin(O)(Glu
  MOD_RES 2: note = d-Alanine
  MOD_RES 4: note = d-Phenylalanine
  MOD_RES 7: note = 2,3-diaminopropionic acid
  REGION 1..7: note = cyclical region
  CROSSLNK 1..7: note = Glu-Dap bond
  MOD_RES 7: note = NH2
EAHFRWX

SEQ ID NO: 210 - protein, 7 aa, synthetic construct
  REGION 1..7: note = Description of sequence: MC4R agonist
  MOD_RES 1: note = Hydantoin(O)(Glu
  MOD_RES 2: note = d-Alanine
  MOD_RES 4: note = d-Phenylalanine
  REGION 1..7: note = cyclical region
  CROSSLNK 1..7: note = Glu-Lys bond
  MOD_RES 7: note = NH2
EAHFRWK

SEQ ID NO: 211 - protein, 6 aa, synthetic construct
  REGION 1..6: note = Description of sequence: MC4R agonist
  MOD_RES 1: note = Hydantoin(O)(Glu
  MOD_RES 2: note = His
  MOD_RES 3: note = d-Phenylalanine
  MOD_RES 6: note = 2,3-diaminopropionic acid
  REGION 1..6: note = cyclical region
  CROSSLNK 1..6: note = Glu-Dap bond
  MOD_RES 6: note = NH2
EHFRWX

SEQ ID NO: 212 - protein, 6 aa, synthetic construct
  REGION 1..6: note = Description of sequence: MC4R agonist
  MOD_RES 1: note = Hydantoin(O)(Glu
  MOD_RES 2: note = His
  MOD_RES 3: note = d-Phenylalanine
  REGION 1..6: note = cyclical region
  CROSSLNK 1..6: note = Glu-Lys bond
  MOD_RES 6: note = NH2
EHFRWK

SEQ ID NO: 213 - protein, 9 aa, synthetic construct
  REGION 1..9: note = Description of sequence: MC4R agonist
  MOD_RES 1: note = Nle
  MOD_RES 3: note = d-Alanine
  MOD_RES 5: note = d-Phenylalanine
  REGION 2..9: note = cyclical region
  DISULFID 2..9: note = Cys-Cys bond
  MOD_RES <1: note = Acetylated
  MOD_RES 9: note = NH2
XCAHFRWGC

SEQ ID NO: 214 - protein, 9 aa, synthetic construct
  REGION 1..9: note = Description of sequence: MC4R agonist
  MOD_RES 1: note = Nle
  MOD_RES 3: note = d-Alanine
  MOD_RES 5: note = d-Phenylalanine
  MOD_RES 8: note = d-Alanine
  REGION 2..9: note = cyclical region
  DISULFID 2..9: note = Cys-Cys bond
  MOD_RES <1: note = Acetylated
  MOD_RES 9: note = NH2
XCAHFRWAC

SEQ ID NO: 215 - protein, 9 aa, synthetic construct
  REGION 1..9: note = Description of sequence: MC4R agonist
  MOD_RES 1: note = Nle
  MOD_RES 3: note = d-Alanine
  MOD_RES 5: note = d-Phenylalanine
  MOD_RES 8: note = Beta-alanine
  REGION 2..9: note = cyclical region
  DISULFID 2..9: note = Cys-Cys bond
  MOD_RES <1: note = Acetylated
  MOD_RES 9: note = NH2
XCAHFRWAC

SEQ ID NO: 216 - protein, 9 aa, synthetic construct
  REGION 1..9: note = Description of sequence: MC4R agonist
  MOD_RES 1: note = Nle
  MOD_RES 3: note = d-Alanine
  MOD_RES 5: note = d-Phenylalanine
  MOD_RES 8: note = 4Abu
  REGION 2..9: note = cyclical region
  DISULFID 2..9: note = Cys-Cys bond
  MOD_RES <1: note = Acetylated
  MOD_RES 9: note = NH2
XCAHFRWXC

SEQ ID NO: 217 - protein, 9 aa, synthetic construct
  REGION 1..9: note = Description of sequence: MC4R agonist
  MOD_RES 1: note = Nle
  MOD_RES 3: note = d-Alanine
  MOD_RES 5: note = d-Phenylalanine
  MOD_RES 8: note = 5-aminopentanoic acid (HN-(CH2)4-C(O)
  REGION 2..9: note = cyclical region
  DISULFID 2..9: note = Cys-Cys bond
  MOD_RES <1: note = Acetylated
  MOD_RES 9: note = NH2
XCAHFRWXC

SEQ ID NO: 218 - protein, 8 aa, synthetic construct
  REGION 1..8: note = Description of sequence: MC4R agonist
  MOD_RES 4: note = d-Phenylalanine
  REGION 1..8: note = cyclical region
  DISULFID 1..8: note = Cys-Cys bond
  MOD_RES <1: note = Acetylated
  MOD_RES 8: note = NH2
CEHFRWAC

SEQ ID NO: 219 - protein, 8 aa, synthetic construct
  REGION 1..8: note = Description of sequence: MC4R agonist
  MOD_RES 4: note = d-Phenylalanine
  MOD_RES 6: note = beta-(2-naphthyl)alanine
  REGION 1..8: note = cyclical region
  DISULFID 1..8: note = Cys-Cys bond
  MOD_RES <1: note = Acetylated
  MOD_RES 8: note = NH2
CEHFRXAC

SEQ ID NO: 220 - protein, 8 aa, synthetic construct
  REGION 1..8: note = Description of sequence: MC4R agonist
  MOD_RES 2: note = d-Alanine
  MOD_RES 4: note = d-Phenylalanine
  REGION 1..8: note = cyclical region
  DISULFID 1..8: note = Cys-Cys bond
  MOD_RES <1: note = Acetylated
  MOD_RES 8: note = NH2
CAHFRWAC

SEQ ID NO: 221 - protein, 8 aa, synthetic construct
  REGION 1..8: note = Description of sequence: MC4R agonist
  MOD_RES 2: note = d-Alanine
  MOD_RES 4: note = d-Phenylalanine
  MOD_RES 6: note = beta-(2-naphthyl)alanine
  REGION 1..8: note = cyclical region
  DISULFID 1..8: note = Cys-Cys bond
  MOD_RES <1: note = Acetylated
  MOD_RES 8: note = NH2
CAHFRXAC

SEQ ID NO: 222 - protein, 9 aa, synthetic construct
  REGION 1..9: note = Description of sequence: MC4R agonist
  MOD_RES 1: note = Nle
  MOD_RES 3: note = d-Alanine
  MOD_RES 5: note = d-Phenylalanine
  REGION 2..9: note = cyclical region
  DISULFID 2..9: note = Cys-Cys bond
  MOD_RES <1: note = Acetylated
  MOD_RES 9: note = NH2
XCAHFRWAC

SEQ ID NO: 223 - protein, 9 aa, synthetic construct
  REGION 1..9: note = Description of sequence: MC4R agonist
  MOD_RES 1: note = Nle
  MOD_RES 3: note = d-Alanine
  MOD_RES 5: note = d-Phenylalanine
  MOD_RES 7: note = 3-benzothienylalanine
  REGION 2..9: note = cyclical region
  CROSSLNK 2..9: note = Asp-Lys bond
  MOD_RES <1: note = Acetylated
  MOD_RES 9: note = NH2
XDAHFRXAK

SEQ ID NO: 224 - protein, 18 aa, synthetic construct
  REGION 1..18: note = Description of sequence: MC4R agonist
  MOD_RES 12: note = Nle
  MOD_RES 15: note = d-beta-(2-naphthyl)alanine
  REGION 13..18: note = cyclical region
  CROSSLNK 13..18: note = Asp-Lys bond
  MOD_RES 18: note = NH2
YGRKKRRQRRRXDHXRWK

SEQ ID NO: 225 - protein, 19 aa, synthetic construct
  REGION 1..19: note = Description of sequence: MC4R agonist
  MOD_RES 12: note = 8-amino-3,6-dioxaoctanoic acid
  MOD_RES 13: note = Nle
  MOD_RES 16: note = d-beta-(2-naphthyl)alanine
  REGION 14..19: note = cyclical region
  CROSSLNK 14..19: note = Asp-Lys bond
  MOD_RES 19: note = NH2
YGRKKRRQRRRXXDHXRWK

SEQ ID NO: 226 - protein, 19 aa, synthetic construct
  REGION 1..19: note = Description of sequence: MC4R agonist
  MOD_RES 1: note = Nle
  MOD_RES 4: note = d-beta-(2-naphthyl)alanine
  MOD_RES 8: note = Beta-alanine
  REGION 2..9: note = cyclical region
  CROSSLNK 2..9: note = Asp-Tyr bond
  MOD_RES 19: note = NH2
XDHXRWKAYGRKKRRQRRR

SEQ ID NO: 227 - protein, 19 aa, synthetic construct
  REGION 1..19: note = Description of sequence: MC4R agonist
  MOD_RES 1: note = Nle
  MOD_RES 4: note = d-beta-(2-naphthyl)alanine
  MOD_RES 8: note = Beta-alanine
  REGION 2..9: note = cyclical region
  CROSSLNK 2..9: note = Asp-Tyr bond
  MOD_RES <1: note = Acetylated
  MOD_RES 19: note = NH2
XDHXRWKAYGRKKRRQRRR

SEQ ID NO: 228 - protein, 20 aa, synthetic construct
  REGION 1..20: note = Description of sequence: MC4R agonist
  MOD_RES 1: note = Nle
  MOD_RES 4: note = d-beta-(2-naphthyl)alanine
  MOD_RES 8: note = 8-amino-3,6-dioxaoctanoic acid
  MOD_RES 9: note = 8-amino-3,6-dioxaoctanoic acid
  REGION 2..9: note = cyclical region
  CROSSLNK 2..9: note = Asp-Doc bond
  MOD_RES 20: note = NH2
XDHXRWKXXYGRKKRRQRRR

SEQ ID NO: 229 - protein, 22 aa, synthetic construct
  REGION 1..22: note = Description of sequence: MC4R agonist
  MOD_RES 1: note = Nle
  MOD_RES 4: note = d-beta-(2-naphthyl)alanine
  REGION 2..9: note = cyclical region
  CROSSLNK 2..9: note = Asp-Pro bond
  MOD_RES <1: note = Acetylated
  MOD_RES 22: note = NH2
XDHXRWKPPKDYGRKKRRQRRR

SEQ ID NO: 230 - protein, 23 aa, synthetic construct
  REGION 1..23: note = Description of sequence: MC4R agonist
  MOD_RES 4: note = d-beta-(2-naphthyl)alanine
  REGION 1..8: note = cyclical region
  DISULFID 1..8: note = Cys-Cys bond
  MOD_RES <1: note = Acetylated
  MOD_RES 23: note = NH2
CEHXRWGCPPKDYGRKKRRQRRR

SEQ ID NO: 231 - protein, 20 aa, synthetic construct
  REGION 1..20: note = Description of sequence: MC4R agonist
  MOD_RES 1: note = Nle
  MOD_RES 4: note = d-beta-(2-naphthyl)alanine
  MOD_RES 8: note = Beta-alanine
  MOD_RES 9: note = Beta-alanine
  REGION 2..9: note = cyclical region
  CROSSLNK 2..9: note = Asp-?Ala bond
  MOD_RES <1: note = Acetylated
  MOD_RES 20: note = NH2
XDHXRWKAAYGRKKRRQRRR

SEQ ID NO: 232 - protein, 23 aa, synthetic construct
  REGION 1..23: note = Description of sequence: MC4R agonist
  MOD_RES 1: note = Nle
  MOD_RES 4: note = d-beta-(2-naphthyl)alanine
  MOD_RES 12: note = 8-amino-3,6-dioxaoctanoic acid
  REGION 2..9: note = cyclical region
  CROSSLNK 2..9: note = Asp-Pro bond
  MOD_RES <1: note = Acetylated
  MOD_RES 23: note = NH2
XDHXRWKPPKDXYGRKKRRQRRR

SEQ ID NO: 233 - protein, 24 aa, synthetic construct
  REGION 1..24: note = Description of sequence: MC4R agonist
  MOD_RES 4: note = d-beta-(2-naphthyl)alanine
  MOD_RES 13: note = 8-amino-3,6-dioxaoctanoic acid
  REGION 1..8: note = cyclical region
  DISULFID 1..8: note = Cys-Cys bond
  MOD_RES <1: note = Acetylated
  MOD_RES 24: note = NH2
CEHXRWGCPPKDXYGRKKRRQRRR

SEQ ID NO: 234 - protein, 23 aa, synthetic construct
  REGION 1..23: note = Description of sequence: MC4R agonist
  MOD_RES 4: note = d-beta-(2-naphthyl)alanine
  REGION 1..8: note = cyclical region
  DISULFID 1..8: note = Cys-Cys bond
  MOD_RES <1: note = Acetylated
  MOD_RES 23: note = NH2
CEHXRWACPPKDYGRKKRRQRRR

SEQ ID NO: 235 - protein, 24 aa, synthetic construct
  REGION 1..24: note = Description of sequence: MC4R agonist
  MOD_RES 4: note = d-beta-(2-naphthyl)alanine
  MOD_RES 13: note = 8-amino-3,6-dioxaoctanoic acid
  REGION 1..8: note = cyclical region
  DISULFID 1..8: note = Cys-Cys bond
  MOD_RES <1: note = Acetylated
  MOD_RES 24: note = NH2
CEHXRWACPPKDXYGRKKRRQRRR

SEQ ID NO: 236 - protein, 20 aa, synthetic construct
  REGION 1..20: note = Description of sequence: MC4R agonist
  MOD_RES 1: note = Nle
  MOD_RES 4: note = d-beta-(2-naphthyl)alanine
  MOD_RES 8: note = 8-amino-3,6-dioxaoctanoic acid
  MOD_RES 9: note = 8-amino-3,6-dioxaoctanoic acid
  REGION 2..9: note = cyclical region
  CROSSLNK 2..9: note = Asp-Lys bond
  MOD_RES <1: note = Acetylated
  MOD_RES 20: note = NH2
XDHXRWKXXYGRKKRRQRRR

SEQ ID NO: 237 - protein, 24 aa, synthetic construct
  REGION 1..24: note = Description of sequence: MC4R agonist
  MOD_RES 4: note = d-beta-(2-naphthyl)alanine
  MOD_RES 6: note = beta-(2-naphthyl)alanine
  MOD_RES 13: note = Beta-alanine
  REGION 1..8: note = cyclical region
  DISULFID 1..8: note = Cys-Cys bond
  MOD_RES <1: note = Acetylated
  MOD_RES 24: note = NH2
CEHXRXACPPKDAYGRKKRRQRRR

SEQ ID NO: 238 - protein, 22 aa, synthetic construct
  REGION 1..22: note = Description of sequence: MC4R agonist
  MOD_RES 4: note = d-beta-(2-naphthyl)alanine
  MOD_RES 6: note = 3-benzothienylalanine
  MOD_RES 13: note = Beta-alanine
  REGION 1..8: note = cyclical region
  DISULFID 1..8: note = Cys-Cys bond
  MOD_RES <1: note = Acetylated
  MOD_RES 22: note = NH2
CEHXRXACPPKDARRRRRQRRR

SEQ ID NO: 239 - protein, 23 aa, synthetic construct
  REGION 1..23: note = Description of sequence: MC4R agonist
  MOD_RES 4: note = d-beta-(2-naphthyl)alanine
  MOD_RES 6: note = 3-benzothienylalanine
  MOD_RES 13: note = Beta-alanine
  REGION 1..8: note = cyclical region
  DISULFID 1..8: note = Cys-Cys bond
  MOD_RES <1: note = Acetylated
  MOD_RES 23: note = NH2
CEHXRXACPPKDAGRRRRRQRRR

SEQ ID NO: 240 - protein, 24 aa, synthetic construct
  REGION 1..24: note = Description of sequence: MC4R agonist
  MOD_RES 4: note = d-beta-(2-naphthyl)alanine
  MOD_RES 6: note = 3-benzothienylalanine
  MOD_RES 13: note = Beta-alanine
  REGION 1..8: note = cyclical region
  DISULFID 1..8: note = Cys-Cys bond
  MOD_RES <1: note = Acetylated
  MOD_RES 24: note = NH2
CEHXRXACPPKDAYGRRRRRQRRR

SEQ ID NO: 241 - protein, 24 aa, synthetic construct
  REGION 1..24: note = Description of sequence: MC4R agonist
  MOD_RES 4: note = d-beta-(2-naphthyl)alanine
  MOD_RES 13: note = Beta-alanine
  REGION 1..8: note = cyclical region
  DISULFID 1..8: note = Cys-Cys bond
  MOD_RES <1: note = Acetylated
  MOD_RES 24: note = NH2
CEHXRWACPPKDAYGRKKRQRRRR

SEQ ID NO: 242 - protein, 24 aa, synthetic construct
  REGION 1..24: note = Description of sequence: MC4R agonist
  MOD_RES 4: note = d-beta-(2-naphthyl)alanine
  MOD_RES 13: note = Beta-alanine
  REGION 1..8: note = cyclical region
  DISULFID 1..8: note = Cys-Cys bond
  MOD_RES <1: note = Acetylated
  MOD_RES 24: note = NH2
CEHXRWACPPKDAYGRKKQRRRRR

SEQ ID NO: 243 - protein, 24 aa, synthetic construct
  REGION 1..24: note = Description of sequence: MC4R agonist
  MOD_RES 4: note = d-beta-(2-naphthyl)alanine
  MOD_RES 13: note = Beta-alanine
  REGION 1..8: note = cyclical region
  DISULFID 1..8: note = Cys-Cys bond
  MOD_RES <1: note = Acetylated
  MOD_RES 24: note = NH2
CEHXRWACPPKDAYGRKQKRRRRR

SEQ ID NO: 244 - protein, 24 aa, synthetic construct
  REGION 1..24: note = Description of sequence: MC4R agonist
  MOD_RES 4: note = d-beta-(2-naphthyl)alanine
  MOD_RES 13: note = Beta-alanine
  REGION 1..8: note = cyclical region
  DISULFID 1..8: note = Cys-Cys bond
  MOD_RES <1: note = Acetylated
  MOD_RES 24: note = NH2
CEHXRWACPPKDAYGRKKRRRRQR

SEQ ID NO: 245 - protein, 24 aa, synthetic construct
  REGION 1..24: note = Description of sequence: MC4R agonist
  MOD_RES 4: note = d-beta-(2-naphthyl)alanine
  MOD_RES 6: note = 3-benzothienylalanine
  MOD_RES 13: note = Beta-alanine
  MOD_RES 15: note = alpha- aminoisobutyric acid
  REGION 1..8: note = cyclical region
  DISULFID 1..8: note = Cys-Cys bond
  MOD_RES <1: note = Acetylated
  MOD_RES 24: note = NH2
CEHXRXACPPKDAYXRKKRRQRRR

SEQ ID NO: 246 - protein, 22 aa, synthetic construct
  REGION 1..22: note = Description of sequence: MC4R agonist
  MOD_RES 4: note = d-beta-(2-naphthyl)alanine
  MOD_RES 6: note = beta-(1-naphthyl)alanine
  MOD_RES 13: note = Beta-alanine
  REGION 1..8: note = cyclical region
  DISULFID 1..8: note = Cys-Cys bond
  MOD_RES <1: note = Acetylated
  MOD_RES 22: note = NH2
CEHXRXACPPRDARRRRRQRRR

SEQ ID NO: 247 - protein, 22 aa, synthetic construct
  REGION 1..22: note = Description of sequence: MC4R agonist
  MOD_RES 4: note = d-beta-(2-naphthyl)alanine
  MOD_RES 6: note = beta-(1-naphthyl)alanine
  MOD_RES 13: note = Beta-alanine
  REGION 1..8: note = cyclical region
  DISULFID 1..8: note = Cys-Cys bond
  MOD_RES <1: note = Acetylated
  MOD_RES 22: note = NH2
CEHXRXACPPKDARRRRRQRRR

SEQ ID NO: 248 - protein, 23 aa, synthetic construct
  REGION 1..23: note = Description of sequence: MC4R agonist
  MOD_RES 4: note = d-beta-(2-naphthyl)alanine
  MOD_RES 6: note = beta-(1-naphthyl)alanine
  MOD_RES 13: note = Beta-alanine
  REGION 1..8: note = cyclical region
  DISULFID 1..8: note = Cys-Cys bond
  MOD_RES <1: note = Acetylated
  MOD_RES 23: note = NH2
CEHXRXACPPKDARRRRRRQRRR

SEQ ID NO: 249 - protein, 22 aa, synthetic construct
  REGION 1..22: note = Description of sequence: MC4R agonist
  MOD_RES 4: note = d-beta-(2-naphthyl)alanine
  MOD_RES 6: note = beta-(2-naphthyl)alanine
  MOD_RES 13: note = Beta-alanine
  REGION 1..8: note = cyclical region
  DISULFID 1..8: note = Cys-Cys bond
  MOD_RES <1: note = Acetylated
  MOD_RES 22: note = NH2
CEHXRXACPPRDARRRRRQRRR

SEQ ID NO: 250 - protein, 22 aa, synthetic construct
  REGION 1..22: note = Description of sequence: MC4R agonist
  MOD_RES 4: note = d-beta-(2-naphthyl)alanine
  MOD_RES 6: note = beta-(2-naphthyl)alanine
  MOD_RES 13: note = Beta-alanine
  REGION 1..8: note = cyclical region
  DISULFID 1..8: note = Cys-Cys bond
  MOD_RES <1: note = Acetylated
  MOD_RES 22: note = NH2
CEHXRXACPPKDARRRRRQRRR

SEQ ID NO: 251 - protein, 23 aa, synthetic construct
  REGION 1..23: note = Description of sequence: MC4R agonist
  MOD_RES 4: note = d-beta-(2-naphthyl)alanine
  MOD_RES 6: note = beta-(2-naphthyl)alanine
  MOD_RES 13: note = Beta-alanine
  REGION 1..8: note = cyclical region
  DISULFID 1..8: note = Cys-Cys bond
  MOD_RES <1: note = Acetylated
  MOD_RES 23: note = NH2
CEHXRXACPPKDARRRRRRQRRR

SEQ ID NO: 252 - protein, 23 aa, synthetic construct
  REGION 1..23: note = Description of sequence: MC4R agonist
  MOD_RES 4: note = d-beta-(2-naphthyl)alanine
  MOD_RES 6: note = 3-benzothienylalanine
  MOD_RES 13: note = Beta-alanine
  REGION 1..8: note = cyclical region
  DISULFID 1..8: note = Cys-Cys bond
  MOD_RES <1: note = Acetylated
  MOD_RES 23: note = NH2
CEHXRXACPPRDARRRRRRQRRR

SEQ ID NO: 253 - protein, 22 aa, synthetic construct
  REGION 1..22: note = Description of sequence: MC4R agonist
  MOD_RES 4: note = d-beta-(2-naphthyl)alanine
  MOD_RES 6: note = 3-benzothienylalanine
  MOD_RES 13: note = Beta-alanine
  REGION 1..8: note = cyclical region
  DISULFID 1..8: note = Cys-Cys bond
  MOD_RES <1: note = Acetylated
  MOD_RES 22: note = NH2
CEHXRXACPPRDARRRRRQRRR

SEQ ID NO: 254 - protein, 23 aa, synthetic construct
  REGION 1..23: note = Description of sequence: MC4R agonist
  MOD_RES 4: note = d-beta-(2-naphthyl)alanine
  MOD_RES 6: note = 3-benzothienylalanine
  MOD_RES 13: note = Beta-alanine
  REGION 1..8: note = cyclical region
  DISULFID 1..8: note = Cys-Cys bond
  MOD_RES <1: note = Acetylated
  MOD_RES 23: note = NH2
CEHXRXACPPKDARRRRRRQRRR

SEQ ID NO: 255 - protein, 24 aa, synthetic construct
  REGION 1..24: note = Description of sequence: MC4R agonist
  MOD_RES 4: note = d-beta-(2-naphthyl)alanine
  MOD_RES 13: note = Beta-alanine
  REGION 1..8: note = cyclical region
  DISULFID 1..8: note = Cys-Cys bond
  MOD_RES <1: note = Acetylated
  MOD_RES 24: note = NH2
CEHXRWACPPKDAYGRKKRRRQRR

SEQ ID NO: 256 - protein, 24 aa, synthetic construct
  REGION 1..24: note = Description of sequence: MC4R agonist
  MOD_RES 4: note = d-beta-(2-naphthyl)alanine
  MOD_RES 13: note = Beta-alanine
  REGION 1..8: note = cyclical region
  DISULFID 1..8: note = Cys-Cys bond
  MOD_RES <1: note = Acetylated
  MOD_RES 24: note = NH2
CEHXRWACPPKDAYGRQKKRRRRR

SEQ ID NO: 257 - protein, 24 aa, synthetic construct
  REGION 1..24: note = Description of sequence: MC4R agonist
  MOD_RES 4: note = d-beta-(2-naphthyl)alanine
  MOD_RES 13: note = Beta-alanine
  REGION 1..8: note = cyclical region
  DISULFID 1..8: note = Cys-Cys bond
  MOD_RES <1: note = Acetylated
  MOD_RES 24: note = NH2
CEHXRWACPPKDAYGRKKRRRRRQ

SEQ ID NO: 258 - protein, 24 aa, synthetic construct
  REGION 1..24: note = Description of sequence: MC4R agonist
  MOD_RES 4: note = d-beta-(2-naphthyl)alanine
  MOD_RES 6: note = beta-(1-naphthyl)alanine
  MOD_RES 13: note = Beta-alanine
  REGION 1..8: note = cyclical region
  DISULFID 1..8: note = Cys-Cys bond
  MOD_RES <1: note = Acetylated
  MOD_RES 24: note = NH2
CEHXRXACPPKDAYGRKKRRQRRR

SEQ ID NO: 259 - protein, 24 aa, synthetic construct
  REGION 1..24: note = Description of sequence: MC4R agonist
  MOD_RES 4: note = d-beta-(2-naphthyl)alanine
  MOD_RES 6: note = 3-benzothienylalanine
  MOD_RES 13: note = Beta-alanine
  REGION 1..8: note = cyclical region
  DISULFID 1..8: note = Cys-Cys bond
  MOD_RES <1: note = Acetylated
  MOD_RES 24: note = NH2
CEHXRXACPPKDAYGRKKRRQRRR

SEQ ID NO: 260 - protein, 22 aa, synthetic construct
  REGION 1..22: note = Description of sequence: MC4R agonist
  MOD_RES 4: note = d-beta-(2-naphthyl)alanine
  MOD_RES 6: note = beta-(1-naphthyl)alanine
  MOD_RES 13: note = Beta-alanine
  REGION 1..8: note = cyclical region
  DISULFID 1..8: note = Cys-Cys bond
  MOD_RES <1: note = Acetylated
  MOD_RES 22: note = NH2
CEHXRXACPPKDARRKRRQRRR

SEQ ID NO: 261 - protein, 22 aa, synthetic construct
  REGION 1..22: note = Description of sequence: MC4R agonist
  MOD_RES 4: note = d-beta-(2-naphthyl)alanine
  MOD_RES 6: note = beta-(1-naphthyl)alanine
  MOD_RES 13: note = Beta-alanine
  REGION 1..8: note = cyclical region
  DISULFID 1..8: note = Cys-Cys bond
  MOD_RES <1: note = Acetylated
  MOD_RES 22: note = NH2
CEHXRXACPPKDARKRRRQRRR

SEQ ID NO: 262 - protein, 22 aa, synthetic construct
  REGION 1..22: note = Description of sequence: MC4R agonist
  MOD_RES 4: note = d-beta-(2-naphthyl)alanine
  MOD_RES 6: note = beta-(2-naphthyl)alanine
  MOD_RES 13: note = Beta-alanine
  REGION 1..8: note = cyclical region
  DISULFID 1..8: note = Cys-Cys bond
  MOD_RES <1: note = Acetylated
  MOD_RES 22: note = NH2
CEHXRXACPPKDARRKRRQRRR

SEQ ID NO: 263 - protein, 24 aa, synthetic construct
  REGION 1..24: note = Description of sequence: MC4R agonist
  MOD_RES 4: note = d-beta-(2-naphthyl)alanine
  MOD_RES 6: note = beta-(2-naphthyl)alanine
  MOD_RES 13: note = Beta-alanine
  REGION 1..8: note = cyclical region
  DISULFID 1..8: note = Cys-Cys bond
  MOD_RES <1: note = Acetylated
  MOD_RES 24: note = NH2
CEHXRXACPPKDAYGRRKRRQRRR

SEQ ID NO: 264 - protein, 23 aa, synthetic construct
  REGION 1..23: note = Description of sequence: MC4R agonist
  MOD_RES 4: note = d-beta-(2-naphthyl)alanine
  MOD_RES 6: note = beta-(2-naphthyl)alanine
  MOD_RES 13: note = Beta-alanine
  REGION 1..8: note = cyclical region
  DISULFID 1..8: note = Cys-Cys bond
  MOD_RES <1: note = Acetylated
  MOD_RES 23: note = NH2
CEHXRXACPPKDAGRRKRRQRRR

SEQ ID NO: 265 - protein, 23 aa, synthetic construct
  REGION 1..23: note = Description of sequence: MC4R agonist
  MOD_RES 4: note = d-beta-(2-naphthyl)alanine
  MOD_RES 6: note = beta-(2-naphthyl)alanine
  MOD_RES 13: note = Beta-alanine
  REGION 1..8: note = cyclical region
  DISULFID 1..8: note = Cys-Cys bond
  MOD_RES <1: note = Acetylated
  MOD_RES 23: note = NH2
CEHXRXACPPKDAGRKRRRQRRR

SEQ ID NO: 266 - protein, 24 aa, synthetic construct
  REGION 1..24: note = Description of sequence: MC4R agonist
  MOD_RES 4: note = d-beta-(2-naphthyl)alanine
  MOD_RES 6: note = beta-(1-naphthyl)alanine
  MOD_RES 13: note = Beta-alanine
  REGION 1..8: note = cyclical region
  DISULFID 1..8: note = Cys-Cys bond
  MOD_RES <1: note = Acetylated
  MOD_RES 24: note = NH2
CEHXRXACPPKDAYGRRKRRQRRR

SEQ ID NO: 267 - protein, 24 aa, synthetic construct
  REGION 1..24: note = Description of sequence: MC4R agonist
  MOD_RES 4: note = d-beta-(2-naphthyl)alanine
  MOD_RES 6: note = beta-(1-naphthyl)alanine
  MOD_RES 13: note = Beta-alanine
  REGION 1..8: note = cyclical region
  DISULFID 1..8: note = Cys-Cys bond
  MOD_RES <1: note = Acetylated
  MOD_RES 24: note = NH2
CEHXRXACPPKDAYGRKRRRQRRR

SEQ ID NO: 268 - protein, 23 aa, synthetic construct
  REGION 1..23: note = Description of sequence: MC4R agonist
  MOD_RES 4: note = d-beta-(2-naphthyl)alanine
  MOD_RES 6: note = beta-(1-naphthyl)alanine
  MOD_RES 13: note = Beta-alanine
  REGION 1..8: note = cyclical region
  DISULFID 1..8: note = Cys-Cys bond
  MOD_RES <1: note = Acetylated
  MOD_RES 23: note = NH2
CEHXRXACPPKDAGRRKRRQRRR

SEQ ID NO: 269 - protein, 23 aa, synthetic construct
  REGION 1..23: note = Description of sequence: MC4R agonist
  MOD_RES 4: note = d-beta-(2-naphthyl)alanine
  MOD_RES 6: note = beta-(1-naphthyl)alanine
  MOD_RES 13: note = Beta-alanine
  REGION 1..8: note = cyclical region
  DISULFID 1..8: note = Cys-Cys bond
  MOD_RES <1: note = Acetylated
  MOD_RES 23: note = NH2
CEHXRXACPPKDAGRKRRRQRRR

SEQ ID NO: 270 - protein, 22 aa, synthetic construct
  REGION 1..22: note = Description of sequence: MC4R agonist
  MOD_RES 4: note = d-beta-(2-naphthyl)alanine
  MOD_RES 6: note = beta-(2-naphthyl)alanine
  MOD_RES 13: note = Beta-alanine
  REGION 1..8: note = cyclical region
  DISULFID 1..8: note = Cys-Cys bond
  MOD_RES <1: note = Acetylated
  MOD_RES 22: note = NH2
CEHXRXACPPKDARRKRRQRRR

SEQ ID NO: 271 - protein, 22 aa, synthetic construct
  REGION 1..22: note = Description of sequence: MC4R agonist
  MOD_RES 4: note = d-beta-(2-naphthyl)alanine
  MOD_RES 6: note = beta-(2-naphthyl)alanine
  MOD_RES 13: note = Beta-alanine
  REGION 1..8: note = cyclical region
  DISULFID 1..8: note = Cys-Cys bond
  MOD_RES <1: note = Acetylated
  MOD_RES 22: note = NH2
CEHXRXACPPKDARKRRRQRRR

SEQ ID NO: 272 - protein, 24 aa, synthetic construct
  REGION 1..24: note = Description of sequence: MC4R agonist
  MOD_RES 4: note = d-beta-(2-naphthyl)alanine
  MOD_RES 6: note = beta-(2-naphthyl)alanine
  MOD_RES 13: note = Beta-alanine
  REGION 1..8: note = cyclical region
  DISULFID 1..8: note = Cys-Cys bond
  MOD_RES <1: note = Acetylated
  MOD_RES 24: note = NH2
CEHXRXACPPKDAYGRKRRRQRRR

SEQ ID NO: 273 - protein, 22 aa, synthetic construct
  REGION 1..22: note = Description of sequence: MC4R agonist
  MOD_RES 4: note = d-beta-(2-naphthyl)alanine
  MOD_RES 6: note = 3-benzothienylalanine
  MOD_RES 13: note = Beta-alanine
  REGION 1..8: note = cyclical region
  DISULFID 1..8: note = Cys-Cys bond
  MOD_RES <1: note = Acetylated
  MOD_RES 22: note = NH2
CEHXRXACPPKDARRKRRQRRR

SEQ ID NO: 274 - protein, 22 aa, synthetic construct
  REGION 1..22: note = Description of sequence: MC4R agonist
  MOD_RES 4: note = d-beta-(2-naphthyl)alanine
  MOD_RES 6: note = 3-benzothienylalanine
  MOD_RES 13: note = Beta-alanine
  REGION 1..8: note = cyclical region
  DISULFID 1..8: note = Cys-Cys bond
  MOD_RES <1: note = Acetylated
  MOD_RES 22: note = NH2
CEHXRXACPPKDARKRRRQRRR

SEQ ID NO: 275 - protein, 24 aa, synthetic construct
  REGION 1..24: note = Description of sequence: MC4R agonist
  MOD_RES 4: note = d-beta-(2-naphthyl)alanine
  MOD_RES 6: note = 3-benzothienylalanine
  MOD_RES 13: note = Beta-alanine
  REGION 1..8: note = cyclical region
  DISULFID 1..8: note = Cys-Cys bond
  MOD_RES <1: note = Acetylated
  MOD_RES 24: note = NH2
CEHXRXACPPKDAYGRRKRRQRRR

SEQ ID NO: 276 - protein, 24 aa, synthetic construct
  REGION 1..24: note = Description of sequence: MC4R agonist
  MOD_RES 4: note = d-beta-(2-naphthyl)alanine
  MOD_RES 6: note = 3-benzothienylalanine
  MOD_RES 13: note = Beta-alanine
  REGION 1..8: note = cyclical region
  DISULFID 1..8: note = Cys-Cys bond
  MOD_RES <1: note = Acetylated
  MOD_RES 24: note = NH2
CEHXRXACPPKDAYGRKRRRQRRR

SEQ ID NO: 277 - protein, 23 aa, synthetic construct
  REGION 1..23: note = Description of sequence: MC4R agonist
  MOD_RES 4: note = d-beta-(2-naphthyl)alanine
  MOD_RES 6: note = 3-benzothienylalanine
  MOD_RES 13: note = Beta-alanine
  REGION 1..8: note = cyclical region
  DISULFID 1..8: note = Cys-Cys bond
  MOD_RES <1: note = Acetylated
  MOD_RES 23: note = NH2
CEHXRXACPPKDAGRRKRRQRRR

SEQ ID NO: 278 - protein, 23 aa, synthetic construct
  REGION 1..23: note = Description of sequence: MC4R agonist
  MOD_RES 4: note = d-beta-(2-naphthyl)alanine
  MOD_RES 6: note = 3-benzothienylalanine
  MOD_RES 13: note = Beta-alanine
  REGION 1..8: note = cyclical region
  DISULFID 1..8: note = Cys-Cys bond
  MOD_RES <1: note = Acetylated
  MOD_RES 23: note = NH2
CEHXRXACPPKDAGRKRRRQRRR

SEQ ID NO: 279 - protein, 22 aa, synthetic construct
  REGION 1..22: note = Description of sequence: MC4R agonist
  MOD_RES 4: note = d-beta-(2-naphthyl)alanine
  MOD_RES 13: note = Beta-alanine
  REGION 1..8: note = cyclical region
  DISULFID 1..8: note = Cys-Cys bond
  MOD_RES <1: note = Acetylated
  MOD_RES 22: note = NH2
CEHXRWACPPKDARRRRRQRRR

SEQ ID NO: 280 - protein, 22 aa, synthetic construct
  REGION 1..22: note = Description of sequence: MC4R agonist
  MOD_RES 4: note = d-beta-(2-naphthyl)alanine
  MOD_RES 13: note = Beta-alanine
  REGION 1..8: note = cyclical region
  DISULFID 1..8: note = Cys-Cys bond
  MOD_RES <1: note = Acetylated
  MOD_RES 22: note = NH2
CEHXRWACPPRDARRRRRQRRR

SEQ ID NO: 281 - protein, 24 aa, synthetic construct
  REGION 1..24: note = Description of sequence: MC4R agonist
  MOD_RES 4: note = d-beta-(2-naphthyl)alanine
  MOD_RES 13: note = Beta-alanine
  REGION 1..8: note = cyclical region
  DISULFID 1..8: note = Cys-Cys bond
  MOD_RES <1: note = Acetylated
  MOD_RES 24: note = NH2
CEHXRWACPPKDAYGRRRRRQRRR

SEQ ID NO: 282 - protein, 24 aa, synthetic construct
  REGION 1..24: note = Description of sequence: MC4R agonist
  MOD_RES 4: note = d-beta-(2-naphthyl)alanine
  MOD_RES 13: note = Beta-alanine
  REGION 1..8: note = cyclical region
  DISULFID 1..8: note = Cys-Cys bond
  MOD_RES <1: note = Acetylated
  MOD_RES 24: note = NH2
CEHXRWACPPRDAYGRRRRRQRRR

SEQ ID NO: 283 - protein, 23 aa, synthetic construct
  REGION 1..23: note = Description of sequence: MC4R agonist
  MOD_RES 4: note = d-beta-(2-naphthyl)alanine
  MOD_RES 13: note = Beta-alanine
  REGION 1..8: note = cyclical region
  DISULFID 1..8: note = Cys-Cys bond
  MOD_RES <1: note = Acetylated
  MOD_RES 23: note = NH2
CEHXRWACPPKDARRRRRQRRRR

SEQ ID NO: 284 - protein, 23 aa, synthetic construct
  REGION 1..23: note = Description of sequence: MC4R agonist
  MOD_RES 4: note = d-beta-(2-naphthyl)alanine
  MOD_RES 13: note = Beta-alanine
  REGION 1..8: note = cyclical region
  DISULFID 1..8: note = Cys-Cys bond
  MOD_RES <1: note = Acetylated
  MOD_RES 23: note = NH2
CEHXRWACPPRDARRRRRQRRRR

SEQ ID NO: 285 - protein, 25 aa, synthetic construct
  REGION 1..25: note = Description of sequence: MC4R agonist
  MOD_RES 4: note = d-beta-(2-naphthyl)alanine
  MOD_RES 13: note = Beta-alanine
  REGION 1..8: note = cyclical region
  DISULFID 1..8: note = Cys-Cys bond
  MOD_RES <1: note = Acetylated
  MOD_RES 25: note = NH2
CEHXRWACPPKDAYGRRRRRQRRRR

SEQ ID NO: 286 - protein, 25 aa, synthetic construct
  REGION 1..25: note = Description of sequence: MC4R agonist
  MOD_RES 4: note = d-beta-(2-naphthyl)alanine
  MOD_RES 13: note = Beta-alanine
  REGION 1..8: note = cyclical region
  DISULFID 1..8: note = Cys-Cys bond
  MOD_RES <1: note = Acetylated
  MOD_RES 25: note = NH2
CEHXRWACPPRDAYGRRRRRQRRRR

SEQ ID NO: 287 - protein, 23 aa, synthetic construct
  REGION 1..23: note = Description of sequence: MC4R agonist
  MOD_RES 4: note = d-beta-(2-naphthyl)alanine
  MOD_RES 6: note = beta-(1-naphthyl)alanine
  MOD_RES 13: note = Beta-alanine
  REGION 1..8: note = cyclical region
  DISULFID 1..8: note = Cys-Cys bond
  MOD_RES <1: note = Acetylated
  MOD_RES 23: note = NH2
CEHXRXACPPKDARRRRRQRRRR

SEQ ID NO: 288 - protein, 23 aa, synthetic construct
  REGION 1..23: note = Description of sequence: MC4R agonist
  MOD_RES 4: note = d-beta-(2-naphthyl)alanine
  MOD_RES 6: note = beta-(1-naphthyl)alanine
  MOD_RES 13: note = Beta-alanine
  REGION 1..8: note = cyclical region
  DISULFID 1..8: note = Cys-Cys bond
  MOD_RES <1: note = Acetylated
  MOD_RES 23: note = NH2
CEHXRXACPPRDARRRRRQRRRR

SEQ ID NO: 289 - protein, 23 aa, synthetic construct
  REGION 1..23: note = Description of sequence: MC4R agonist
  MOD_RES 4: note = d-beta-(2-naphthyl)alanine
  MOD_RES 6: note = beta-(1-naphthyl)alanine
  MOD_RES 13: note = Beta-alanine
  REGION 1..8: note = cyclical region
  DISULFID 1..8: note = Cys-Cys bond
  MOD_RES <1: note = Acetylated
  MOD_RES 23: note = NH2
CEHXRXACPPRDARRRRRRQRRR

SEQ ID NO: 290 - protein, 24 aa, synthetic construct
  REGION 1..24: note = Description of sequence: MC4R agonist
  MOD_RES 4: note = d-beta-(2-naphthyl)alanine
  MOD_RES 6: note = beta-(1-naphthyl)alanine
  MOD_RES 13: note = Beta-alanine
  REGION 1..8: note = cyclical region
  DISULFID 1..8: note = Cys-Cys bond
  MOD_RES <1: note = Acetylated
  MOD_RES 24: note = NH2
CEHXRXACPPKDAYGRRRRRQRRR

SEQ ID NO: 291 - protein, 24 aa, synthetic construct
  REGION 1..24: note = Description of sequence: MC4R agonist
  MOD_RES 4: note = d-beta-(2-naphthyl)alanine
  MOD_RES 6: note = beta-(1-naphthyl)alanine
  MOD_RES 13: note = Beta-alanine
  REGION 1..8: note = cyclical region
  DISULFID 1..8: note = Cys-Cys bond
  MOD_RES <1: note = Acetylated
  MOD_RES 24: note = NH2
CEHXRXACPPRDAYGRRRRRQRRR

SEQ ID NO: 292 - protein, 25 aa, synthetic construct
  REGION 1..25: note = Description of sequence: MC4R agonist
  MOD_RES 4: note = d-beta-(2-naphthyl)alanine
  MOD_RES 6: note = beta-(1-naphthyl)alanine
  MOD_RES 13: note = Beta-alanine
  REGION 1..8: note = cyclical region
  DISULFID 1..8: note = Cys-Cys bond
  MOD_RES <1: note = Acetylated
  MOD_RES 25: note = NH2
CEHXRXACPPKDAYGRRRRRQRRRR

SEQ ID NO: 293 - protein, 25 aa, synthetic construct
  REGION 1..25: note = Description of sequence: MC4R agonist
  MOD_RES 4: note = d-beta-(2-naphthyl)alanine
  MOD_RES 6: note = beta-(1-naphthyl)alanine
  MOD_RES 13: note = Beta-alanine
  REGION 1..8: note = cyclical region
  DISULFID 1..8: note = Cys-Cys bond
  MOD_RES <1: note = Acetylated
  MOD_RES 25: note = NH2
CEHXRXACPPRDAYGRRRRRQRRRR

SEQ ID NO: 294 - protein, 25 aa, synthetic construct
  REGION 1..25: note = Description of sequence: MC4R agonist
  MOD_RES 4: note = d-beta-(2-naphthyl)alanine
  MOD_RES 6: note = beta-(1-naphthyl)alanine
  MOD_RES 13: note = Beta-alanine
  REGION 1..8: note = cyclical region
  DISULFID 1..8: note = Cys-Cys bond
  MOD_RES <1: note = Acetylated
  MOD_RES 25: note = NH2
CEHXRXACPPKDAYGRRRRRRQRRR

SEQ ID NO: 295 - protein, 25 aa, synthetic construct
  REGION 1..25: note = Description of sequence: MC4R agonist
  MOD_RES 4: note = d-beta-(2-naphthyl)alanine
  MOD_RES 6: note = beta-(1-naphthyl)alanine
  MOD_RES 13: note = Beta-alanine
  REGION 1..8: note = cyclical region
  DISULFID 1..8: note = Cys-Cys bond
  MOD_RES <1: note = Acetylated
  MOD_RES 25: note = NH2
CEHXRXACPPRDAYGRRRRRRQRRR

SEQ ID NO: 296 - protein, 23 aa, synthetic construct
  REGION 1..23: note = Description of sequence: MC4R agonist
  MOD_RES 4: note = d-beta-(2-naphthyl)alanine
  MOD_RES 6: note = beta-(2-naphthyl)alanine
  MOD_RES 13: note = Beta-alanine
  REGION 1..8: note = cyclical region
  DISULFID 1..8: note = Cys-Cys bond
  MOD_RES <1: note = Acetylated
  MOD_RES 23: note = NH2
CEHXRXACPPRDARRRRRRQRRR

SEQ ID NO: 297 - protein, 23 aa, synthetic construct
  REGION 1..23: note = Description of sequence: MC4R agonist
  MOD_RES 4: note = d-beta-(2-naphthyl)alanine
  MOD_RES 6: note = beta-(2-naphthyl)alanine
  MOD_RES 13: note = Beta-alanine
  REGION 1..8: note = cyclical region
  DISULFID 1..8: note = Cys-Cys bond
  MOD_RES <1: note = Acetylated
  MOD_RES 23: note = NH2
CEHXRXACPPKDARRRRRQRRRR

SEQ ID NO: 298 - protein, 23 aa, synthetic construct
  REGION 1..23: note = Description of sequence: MC4R agonist
  MOD_RES 4: note = d-beta-(2-naphthyl)alanine
  MOD_RES 6: note = beta-(2-naphthyl)alanine
  MOD_RES 13: note = Beta-alanine
  REGION 1..8: note = cyclical region
  DISULFID 1..8: note = Cys-Cys bond
  MOD_RES <1: note = Acetylated
  MOD_RES 23: note = NH2
CEHXRXACPPRDARRRRRQRRRR

SEQ ID NO: 299 - protein, 24 aa, synthetic construct
  REGION 1..24: note = Description of sequence: MC4R agonist
  MOD_RES 4: note = d-beta-(2-naphthyl)alanine
  MOD_RES 6: note = beta-(2-naphthyl)alanine
  MOD_RES 13: note = Beta-alanine
  REGION 1..8: note = cyclical region
  DISULFID 1..8: note = Cys-Cys bond
  MOD_RES <1: note = Acetylated
  MOD_RES 24: note = NH2
CEHXRXACPPKDAYGRRRRRQRRR

SEQ ID NO: 300 - protein, 24 aa, synthetic construct
  REGION 1..24: note = Description of sequence: MC4R agonist
  MOD_RES 4: note = d-beta-(2-naphthyl)alanine
  MOD_RES 6: note = beta-(2-naphthyl)alanine
  MOD_RES 13: note = Beta-alanine
  REGION 1..8: note = cyclical region
  DISULFID 1..8: note = Cys-Cys bond
  MOD_RES <1: note = Acetylated
  MOD_RES 24: note = NH2
CEHXRXACPPRDAYGRRRRRQRRR

SEQ ID NO: 301 - protein, 25 aa, synthetic construct
  REGION 1..25: note = Description of sequence: MC4R agonist
  MOD_RES 4: note = d-beta-(2-naphthyl)alanine
  MOD_RES 6: note = beta-(2-naphthyl)alanine
  MOD_RES 13: note = Beta-alanine
  REGION 1..8: note = cyclical region
  DISULFID 1..8: note = Cys-Cys bond
  MOD_RES <1: note = Acetylated
  MOD_RES 25: note = NH2
CEHXRXACPPKDAYGRRRRRRQRRR

SEQ ID NO: 302 - protein, 25 aa, synthetic construct
  REGION 1..25: note = Description of sequence: MC4R agonist
  MOD_RES 4: note = d-beta-(2-naphthyl)alanine
  MOD_RES 6: note = beta-(2-naphthyl)alanine
  MOD_RES 13: note = Beta-alanine
  REGION 1..8: note = cyclical region
  DISULFID 1..8: note = Cys-Cys bond
  MOD_RES <1: note = Acetylated
  MOD_RES 25: note = NH2
CEHXRXACPPRDAYGRRRRRRQRRR

SEQ ID NO: 303 - protein, 25 aa, synthetic construct
  REGION 1..25: note = Description of sequence: MC4R agonist
  MOD_RES 4: note = d-beta-(2-naphthyl)alanine
  MOD_RES 6: note = beta-(2-naphthyl)alanine
  MOD_RES 13: note = Beta-alanine
  REGION 1..8: note = cyclical region
  DISULFID 1..8: note = Cys-Cys bond
  MOD_RES <1: note = Acetylated
  MOD_RES 25: note = NH2
CEHXRXACPPKDAYGRRRRRQRRRR

SEQ ID NO: 304 - protein, 25 aa, synthetic construct
  REGION 1..25: note = Description of sequence: MC4R agonist
  MOD_RES 4: note = d-beta-(2-naphthyl)alanine
  MOD_RES 6: note = beta-(2-naphthyl)alanine
  MOD_RES 13: note = Beta-alanine
  REGION 1..8: note = cyclical region
  DISULFID 1..8: note = Cys-Cys bond
  MOD_RES <1: note = Acetylated
  MOD_RES 25: note = NH2
CEHXRXACPPRDAYGRRRRRQRRRR

SEQ ID NO: 305 - protein, 23 aa, synthetic construct
  REGION 1..23: note = Description of sequence: MC4R agonist
  MOD_RES 4: note = d-beta-(2-naphthyl)alanine
  MOD_RES 6: note = 3-benzothienylalanine
  MOD_RES 13: note = Beta-alanine
  REGION 1..8: note = cyclical region
  DISULFID 1..8: note = Cys-Cys bond
  MOD_RES <1: note = Acetylated
  MOD_RES 23: note = NH2
CEHXRXACPPKDARRRRRQRRRR

SEQ ID NO: 306 - protein, 23 aa, synthetic construct
  REGION 1..23: note = Description of sequence: MC4R agonist
  MOD_RES 4: note = d-beta-(2-naphthyl)alanine
  MOD_RES 6: note = 3-benzothienylalanine
  MOD_RES 13: note = Beta-alanine
  REGION 1..8: note = cyclical region
  DISULFID 1..8: note = Cys-Cys bond
  MOD_RES <1: note = Acetylated
  MOD_RES 23: note = NH2
CEHXRXACPPRDARRRRRQRRRR

SEQ ID NO: 307 - protein, 24 aa, synthetic construct
  REGION 1..24: note = Description of sequence: MC4R agonist
  MOD_RES 4: note = d-beta-(2-naphthyl)alanine
  MOD_RES 6: note = 3-benzothienylalanine
  MOD_RES 13: note = Beta-alanine
  REGION 1..8: note = cyclical region
  DISULFID 1..8: note = Cys-Cys bond
  MOD_RES <1: note = Acetylated
  MOD_RES 24: note = NH2
CEHXRXACPPRDAYGRRRRRQRRR

SEQ ID NO: 308 - protein, 25 aa, synthetic construct
  REGION 1..25: note = Description of sequence: MC4R agonist
  MOD_RES 4: note = d-beta-(2-naphthyl)alanine
  MOD_RES 6: note = 3-benzothienylalanine
  MOD_RES 13: note = Beta-alanine
  REGION 1..8: note = cyclical region
  DISULFID 1..8: note = Cys-Cys bond
  MOD_RES <1: note = Acetylated
  MOD_RES 25: note = NH2
CEHXRXACPPKDAYGRRRRRQRRRR

SEQ ID NO: 309 - protein, 25 aa, synthetic construct
  REGION 1..25: note = Description of sequence: MC4R agonist
  MOD_RES 4: note = d-beta-(2-naphthyl)alanine
  MOD_RES 6: note = 3-benzothienylalanine
  MOD_RES 13: note = Beta-alanine
  REGION 1..8: note = cyclical region
  DISULFID 1..8: note = Cys-Cys bond
  MOD_RES <1: note = Acetylated
  MOD_RES 25: note = NH2
CEHXRXACPPRDAYGRRRRRQRRRR

SEQ ID NO: 310 - protein, 25 aa, synthetic construct
  REGION 1..25: note = Description of sequence: MC4R agonist
  MOD_RES 4: note = d-beta-(2-naphthyl)alanine
  MOD_RES 6: note = 3-benzothienylalanine
  MOD_RES 13: note = Beta-alanine
  REGION 1..8: note = cyclical region
  DISULFID 1..8: note = Cys-Cys bond
  MOD_RES <1: note = Acetylated
  MOD_RES 25: note = NH2
CEHXRXACPPKDAYGRRRRRRQRRR

SEQ ID NO: 311 - protein, 25 aa, synthetic construct
  REGION 1..25: note = Description of sequence: MC4R agonist
  MOD_RES 4: note = d-beta-(2-naphthyl)alanine
  MOD_RES 6: note = 3-benzothienylalanine
  MOD_RES 13: note = Beta-alanine
  REGION 1..8: note = cyclical region
  DISULFID 1..8: note = Cys-Cys bond
  MOD_RES <1: note = Acetylated
  MOD_RES 25: note = NH2
CEHXRXACPPRDAYGRRRRRRQRRR

SEQ ID NO: 312 - protein, 21 aa, synthetic construct
  REGION 1..21: note = Description of sequence: MC4R agonist
  MOD_RES 1: note = Nle
  MOD_RES 3: note = d-Alanine
  MOD_RES 5: note = d-Phenylalanine
  MOD_RES 9: note = 8-amino-3,6-dioxaoctanoic acid
  MOD_RES 10: note = 8-amino-3,6-dioxaoctanoic acid
  REGION 2..8: note = cyclical region
  DISULFID 2..8: note = Cys-Cys bond
  MOD_RES <1: note = Acetylated
  MOD_RES 21: note = NH2
XCAHFRWCXXYGRKKRRQRRR

SEQ ID NO: 313 - protein, 20 aa, synthetic construct
  REGION 1..20: note = Description of sequence: MC4R agonist
  MOD_RES 1: note = Nle
  MOD_RES 3: note = d-Alanine
  MOD_RES 5: note = d-Phenylalanine
  MOD_RES 9: note = Beta-alanine
  REGION 2..8: note = cyclical region
  DISULFID 2..8: note = Cys-Cys bond
  MOD_RES <1: note = Acetylated
  MOD_RES 20: note = NH2
XCAHFRWCAYGRKKRQRRRR

SEQ ID NO: 314 - protein, 20 aa, synthetic construct
  REGION 1..20: note = Description of sequence: MC4R agonist
  MOD_RES 1: note = Nle
  MOD_RES 3: note = d-Alanine
  MOD_RES 5: note = d-Phenylalanine
  MOD_RES 9: note = 8-amino-3,6-dioxaoctanoic acid
  REGION 2..8: note = cyclical region
  DISULFID 2..8: note = Cys-Cys bond
  MOD_RES <1: note = Acetylated
  MOD_RES 20: note = NH2
XCAHFRWCXYGRKKRRQRRR

SEQ ID NO: 315 - protein, 18 aa, synthetic construct
  REGION 1..18: note = Description of sequence: MC4R agonist
  MOD_RES 1: note = Nle
  MOD_RES 3: note = d-Alanine
  MOD_RES 5: note = d-Phenylalanine
  MOD_RES 9: note = Beta-alanine
  REGION 2..8: note = cyclical region
  DISULFID 2..8: note = Cys-Cys bond
  MOD_RES <1: note = Acetylated
  MOD_RES 18: note = NH2
XCAHFRWCARRRRRQRRR

SEQ ID NO: 316 - protein, 19 aa, synthetic construct
  REGION 1..19: note = Description of sequence: MC4R agonist
  MOD_RES 1: note = Nle
  MOD_RES 3: note = d-Alanine
  MOD_RES 5: note = d-Phenylalanine
  MOD_RES 9: note = Beta-alanine
  REGION 2..8: note = cyclical region
  DISULFID 2..8: note = Cys-Cys bond
  MOD_RES <1: note = Acetylated
  MOD_RES 19: note = NH2
XCAHFRWCAGRRRRRQRRR

SEQ ID NO: 317 - protein, 20 aa, synthetic construct
  REGION 1..20: note = Description of sequence: MC4R agonist
  MOD_RES 1: note = Nle
  MOD_RES 3: note = d-Alanine
  MOD_RES 5: note = d-Phenylalanine
  MOD_RES 9: note = Beta-alanine
  REGION 2..8: note = cyclical region
  DISULFID 2..8: note = Cys-Cys bond
  MOD_RES <1: note = Acetylated
  MOD_RES 20: note = NH2
XCAHFRWCAYGRRRRRQRRR

SEQ ID NO: 318 - protein, 20 aa, synthetic construct
  REGION 1..20: note = Description of sequence: MC4R agonist
  MOD_RES 1: note = Nle
  MOD_RES 3: note = d-Alanine
  MOD_RES 5: note = d-Phenylalanine
  MOD_RES 9: note = Beta-alanine
  REGION 2..8: note = cyclical region
  DISULFID 2..8: note = Cys-Cys bond
  MOD_RES <1: note = Acetylated
  MOD_RES 20: note = NH2
XCAHFRWCAGRRRRRQRRRR

SEQ ID NO: 319 - protein, 20 aa, synthetic construct
  REGION 1..20: note = Description of sequence: MC4R agonist
  MOD_RES 1: note = Nle
  MOD_RES 3: note = d-Alanine
  MOD_RES 5: note = d-Phenylalanine
  MOD_RES 9: note = Beta-alanine
  REGION 2..8: note = cyclical region
  DISULFID 2..8: note = Cys-Cys bond
  MOD_RES <1: note = Acetylated
  MOD_RES 20: note = NH2
XCAHFRWCAYGRRKRRQRRR

SEQ ID NO: 320 - protein, 20 aa, synthetic construct
  REGION 1..20: note = Description of sequence: MC4R agonist
  MOD_RES 1: note = Nle
  MOD_RES 3: note = d-Alanine
  MOD_RES 5: note = d-Phenylalanine
  MOD_RES 9: note = Beta-alanine
  REGION 2..8: note = cyclical region
  DISULFID 2..8: note = Cys-Cys bond
  MOD_RES <1: note = Acetylated
  MOD_RES 20: note = NH2
XCAHFRWCAYGRKRRRQRRR

SEQ ID NO: 321 - protein, 19 aa, synthetic construct
  REGION 1..19: note = Description of sequence: MC4R agonist
  MOD_RES 1: note = Nle
  MOD_RES 3: note = d-Alanine
  MOD_RES 5: note = d-Phenylalanine
  MOD_RES 9: note = Beta-alanine
  REGION 2..8: note = cyclical region
  DISULFID 2..8: note = Cys-Cys bond
  MOD_RES <1: note = Acetylated
  MOD_RES 19: note = NH2
XCAHFRWCAGRRKRRQRRR

SEQ ID NO: 322 - protein, 19 aa, synthetic construct
  REGION 1..19: note = Description of sequence: MC4R agonist
  MOD_RES 1: note = Nle
  MOD_RES 3: note = d-Alanine
  MOD_RES 5: note = d-Phenylalanine
  MOD_RES 9: note = Beta-alanine
  REGION 2..8: note = cyclical region
  DISULFID 2..8: note = Cys-Cys bond
  MOD_RES <1: note = Acetylated
  MOD_RES 19: note = NH2
XCAHFRWCAGRKRRRQRRR

SEQ ID NO: 323 - protein, 18 aa, synthetic construct
  REGION 1..18: note = Description of sequence: MC4R agonist
  MOD_RES 1: note = Nle
  MOD_RES 3: note = d-Alanine
  MOD_RES 5: note = d-Phenylalanine
  MOD_RES 9: note = Beta-alanine
  REGION 2..8: note = cyclical region
  DISULFID 2..8: note = Cys-Cys bond
  MOD_RES <1: note = Acetylated
  MOD_RES 18: note = NH2
XCAHFRWCARRKRRQRRR

SEQ ID NO: 324 - protein, 18 aa, synthetic construct
  REGION 1..18: note = Description of sequence: MC4R agonist
  MOD_RES 1: note = Nle
  MOD_RES 3: note = d-Alanine
  MOD_RES 5: note = d-Phenylalanine
  MOD_RES 9: note = Beta-alanine
  REGION 2..8: note = cyclical region
  DISULFID 2..8: note = Cys-Cys bond
  MOD_RES <1: note = Acetylated
  MOD_RES 18: note = NH2
XCAHFRWCARKRRRQRRR

SEQ ID NO: 325 - protein, 19 aa, synthetic construct
  REGION 1..19: note = Description of sequence: MC4R agonist
  MOD_RES 1: note = Nle
  MOD_RES 3: note = d-Alanine
  MOD_RES 5: note = d-Phenylalanine
  MOD_RES 9: note = Beta-alanine
  MOD_RES 10: note = Beta-alanine
  REGION 2..8: note = cyclical region
  DISULFID 2..8: note = Cys-Cys bond
  MOD_RES <1: note = Acetylated
  MOD_RES 19: note = NH2
XCAHFRWCAARRRRRQRRR

SEQ ID NO: 326 - protein, 20 aa, synthetic construct
  REGION 1..20: note = Description of sequence: MC4R agonist
  MOD_RES 1: note = Nle
  MOD_RES 3: note = d-Alanine
  MOD_RES 5: note = d-Phenylalanine
  MOD_RES 9: note = Beta-alanine
  MOD_RES 10: note = Beta-alanine
  REGION 2..8: note = cyclical region
  DISULFID 2..8: note = Cys-Cys bond
  MOD_RES <1: note = Acetylated
  MOD_RES 20: note = NH2
XCAHFRWCAAGRRRRRQRRR

SEQ ID NO: 327 - protein, 21 aa, synthetic construct
  REGION 1..21: note = Description of sequence: MC4R agonist
  MOD_RES 1: note = Nle
  MOD_RES 3: note = d-Alanine
  MOD_RES 5: note = d-Phenylalanine
  MOD_RES 9: note = Beta-alanine
  MOD_RES 10: note = Beta-alanine
  REGION 2..8: note = cyclical region
  DISULFID 2..8: note = Cys-Cys bond
  MOD_RES <1: note = Acetylated
  MOD_RES 21: note = NH2
XCAHFRWCAAYGRRRRRQRRR

SEQ ID NO: 328 - protein, 18 aa, synthetic construct
  REGION 1..18: note = Description of sequence: MC4R agonist
  MOD_RES 1: note = Nle
  MOD_RES 3: note = d-Alanine
  MOD_RES 5: note = d-Phenylalanine
  MOD_RES 9: note = 8-amino-3,6-dioxaoctanoic acid
  REGION 2..8: note = cyclical region
  DISULFID 2..8: note = Cys-Cys bond
  MOD_RES <1: note = Acetylated
  MOD_RES 18: note = NH2
XCAHFRWCXRRRRRQRRR

SEQ ID NO: 329 - protein, 19 aa, synthetic construct
  REGION 1..19: note = Description of sequence: MC4R agonist
  MOD_RES 1: note = Nle
  MOD_RES 3: note = d-Alanine
  MOD_RES 5: note = d-Phenylalanine
  MOD_RES 9: note = 8-amino-3,6-dioxaoctanoic acid
  REGION 2..8: note = cyclical region
  DISULFID 2..8: note = Cys-Cys bond
  MOD_RES <1: note = Acetylated
  MOD_RES 19: note = NH2
XCAHFRWCXGRRRRRQRRR

SEQ ID NO: 330 - protein, 20 aa, synthetic construct
  REGION 1..20: note = Description of sequence: MC4R agonist
  MOD_RES 1: note = Nle
  MOD_RES 3: note = d-Alanine
  MOD_RES 5: note = d-Phenylalanine
  MOD_RES 9: note = 8-amino-3,6-dioxaoctanoic acid
  REGION 2..8: note = cyclical region
  DISULFID 2..8: note = Cys-Cys bond
  MOD_RES <1: note = Acetylated
  MOD_RES 20: note = NH2
XCAHFRWCXYGRRRRRQRRR

SEQ ID NO: 331 - protein, 19 aa, synthetic construct
  REGION 1..19: note = Description of sequence: MC4R agonist
  MOD_RES 1: note = Nle
  MOD_RES 3: note = d-Alanine
  MOD_RES 5: note = d-Phenylalanine
  MOD_RES 9: note = 8-amino-3,6-dioxaoctanoic acid
  MOD_RES 10: note = 8-amino-3,6-dioxaoctanoic acid
  REGION 2..8: note = cyclical region
  DISULFID 2..8: note = Cys-Cys bond
  MOD_RES <1: note = Acetylated
  MOD_RES 19: note = NH2
XCAHFRWCXXRRRRRQRRR

SEQ ID NO: 332 - protein, 20 aa, synthetic construct
  REGION 1..20: note = Description of sequence: MC4R agonist
  MOD_RES 1: note = Nle
  MOD_RES 3: note = d-Alanine
  MOD_RES 5: note = d-Phenylalanine
  MOD_RES 9: note = 8-amino-3,6-dioxaoctanoic acid
  MOD_RES 10: note = 8-amino-3,6-dioxaoctanoic acid
  REGION 2..8: note = cyclical region
  DISULFID 2..8: note = Cys-Cys bond
  MOD_RES <1: note = Acetylated
  MOD_RES 20: note = NH2
XCAHFRWCXXGRRRRRQRRR

SEQ ID NO: 333 - protein, 21 aa, synthetic construct
  REGION 1..21: note = Description of sequence: MC4R agonist
  MOD_RES 1: note = Nle
  MOD_RES 3: note = d-Alanine
  MOD_RES 5: note = d-Phenylalanine
  MOD_RES 9: note = 8-amino-3,6-dioxaoctanoic acid
  MOD_RES 10: note = 8-amino-3,6-dioxaoctanoic acid
  REGION 2..8: note = cyclical region
  DISULFID 2..8: note = Cys-Cys bond
  MOD_RES <1: note = Acetylated
  MOD_RES 21: note = NH2
XCAHFRWCXXYGRRRRRQRRR

SEQ ID NO: 334 - protein, 19 aa, synthetic construct
  REGION 1..19: note = Description of sequence: MC4R agonist
  MOD_RES 1: note = Nle
  MOD_RES 3: note = d-Alanine
  MOD_RES 5: note = d-Phenylalanine
  MOD_RES 9: note = Beta-alanine
  REGION 2..8: note = cyclical region
  DISULFID 2..8: note = Cys-Cys bond
  MOD_RES <1: note = Acetylated
  MOD_RES 19: note = NH2
XCAHFRWCARRRRRQRRRR

SEQ ID NO: 335 - protein, 21 aa, synthetic construct
  REGION 1..21: note = Description of sequence: MC4R agonist
  MOD_RES 1: note = Nle
  MOD_RES 3: note = d-Alanine
  MOD_RES 5: note = d-Phenylalanine
  MOD_RES 9: note = Beta-alanine
  REGION 2..8: note = cyclical region
  DISULFID 2..8: note = Cys-Cys bond
  MOD_RES <1: note = Acetylated
  MOD_RES 21: note = NH2
XCAHFRWCAYGRRRRRQRRRR

SEQ ID NO: 336 - protein, 20 aa, synthetic construct
  REGION 1..20: note = Description of sequence: MC4R agonist
  MOD_RES 1: note = Nle
  MOD_RES 3: note = d-Alanine
  MOD_RES 5: note = d-Phenylalanine
  MOD_RES 9: note = Beta-alanine
  MOD_RES 10: note = Beta-alanine
  REGION 2..8: note = cyclical region
  DISULFID 2..8: note = Cys-Cys bond
  MOD_RES <1: note = Acetylated
  MOD_RES 20: note = NH2
XCAHFRWCAARRRRRQRRRR

SEQ ID NO: 337 - protein, 21 aa, synthetic construct
  REGION 1..21: note = Description of sequence: MC4R agonist
  MOD_RES 1: note = Nle
  MOD_RES 3: note = d-Alanine
  MOD_RES 5: note = d-Phenylalanine
  MOD_RES 9: note = Beta-alanine
  MOD_RES 10: note = Beta-alanine
  REGION 2..8: note = cyclical region
  DISULFID 2..8: note = Cys-Cys bond
  MOD_RES <1: note = Acetylated
  MOD_RES 21: note = NH2
XCAHFRWCAAGRRRRRQRRRR

SEQ ID NO: 338 - protein, 22 aa, synthetic construct
  REGION 1..22: note = Description of sequence: MC4R agonist
  MOD_RES 1: note = Nle
  MOD_RES 3: note = d-Alanine
  MOD_RES 5: note = d-Phenylalanine
  MOD_RES 9: note = Beta-alanine
  MOD_RES 10: note = Beta-alanine
  REGION 2..8: note = cyclical region
  DISULFID 2..8: note = Cys-Cys bond
  MOD_RES <1: note = Acetylated
  MOD_RES 22: note = NH2
XCAHFRWCAAYGRRRRRQRRRR

SEQ ID NO: 339 - protein, 19 aa, synthetic construct
  REGION 1..19: note = Description of sequence: MC4R agonist
  MOD_RES 1: note = Nle
  MOD_RES 3: note = d-Alanine
  MOD_RES 5: note = d-Phenylalanine
  MOD_RES 9: note = 8-amino-3,6-dioxaoctanoic acid
  REGION 2..8: note = cyclical region
  DISULFID 2..8: note = Cys-Cys bond
  MOD_RES <1: note = Acetylated
  MOD_RES 19: note = NH2
XCAHFRWCXRRRRRQRRRR

SEQ ID NO: 340 - protein, 20 aa, synthetic construct
  REGION 1..20: note = Description of sequence: MC4R agonist
  MOD_RES 1: note = Nle
  MOD_RES 3: note = d-Alanine
  MOD_RES 5: note = d-Phenylalanine
  MOD_RES 9: note = 8-amino-3,6-dioxaoctanoic acid
  REGION 2..8: note = cyclical region
  DISULFID 2..8: note = Cys-Cys bond
  MOD_RES <1: note = Acetylated
  MOD_RES 20: note = NH2
XCAHFRWCXGRRRRRQRRRR

SEQ ID NO: 341 - protein, 21 aa, synthetic construct
  REGION 1..21: note = Description of sequence: MC4R agonist
  MOD_RES 1: note = Nle
  MOD_RES 3: note = d-Alanine
  MOD_RES 5: note = d-Phenylalanine
  MOD_RES 9: note = 8-amino-3,6-dioxaoctanoic acid
  REGION 2..8: note = cyclical region
  DISULFID 2..8: note = Cys-Cys bond
  MOD_RES <1: note = Acetylated
  MOD_RES 21: note = NH2
XCAHFRWCXYGRRRRRQRRRR

SEQ ID NO: 342 - protein, 20 aa, synthetic construct
  REGION 1..20: note = Description of sequence: MC4R agonist
  MOD_RES 1: note = Nle
  MOD_RES 3: note = d-Alanine
  MOD_RES 5: note = d-Phenylalanine
  MOD_RES 9: note = 8-amino-3,6-dioxaoctanoic acid
  MOD_RES 10: note = 8-amino-3,6-dioxaoctanoic acid
  REGION 2..8: note = cyclical region
  DISULFID 2..8: note = Cys-Cys bond
  MOD_RES <1: note = Acetylated
  MOD_RES 20: note = NH2
XCAHFRWCXXRRRRRQRRRR

SEQ ID NO: 343 - protein, 21 aa, synthetic construct
  REGION 1..21: note = Description of sequence: MC4R agonist
  MOD_RES 1: note = Nle
  MOD_RES 3: note = d-Alanine
  MOD_RES 5: note = d-Phenylalanine
  MOD_RES 9: note = 8-amino-3,6-dioxaoctanoic acid
  MOD_RES 10: note = 8-amino-3,6-dioxaoctanoic acid
  REGION 2..8: note = cyclical region
  DISULFID 2..8: note = Cys-Cys bond
  MOD_RES <1: note = Acetylated
  MOD_RES 21: note = NH2
XCAHFRWCXXGRRRRRQRRRR

SEQ ID NO: 344 - protein, 22 aa, synthetic construct
  REGION 1..22: note = Description of sequence: MC4R agonist
  MOD_RES 1: note = Nle
  MOD_RES 3: note = d-Alanine
  MOD_RES 5: note = d-Phenylalanine
  MOD_RES 9: note = 8-amino-3,6-dioxaoctanoic acid
  MOD_RES 10: note = 8-amino-3,6-dioxaoctanoic acid
  REGION 2..8: note = cyclical region
  DISULFID 2..8: note = Cys-Cys bond
  MOD_RES <1: note = Acetylated
  MOD_RES 22: note = NH2
XCAHFRWCXXYGRRRRRQRRRR

SEQ ID NO: 345 - protein, 20 aa, synthetic construct
  REGION 1..20: note = Description of sequence: MC4R agonist
  MOD_RES 1: note = Nle
  MOD_RES 4: note = d-Phenylalanine
  MOD_RES 7: note = 4Abu
  MOD_RES 9: note = Beta-alanine
  REGION 2..8: note = cyclical region
  DISULFID 2..8: note = Cys-Cys bond
  MOD_RES <1: note = Acetylated
  MOD_RES 20: note = NH2
XCHFRWXCAYGRRRRRQRRR

SEQ ID NO: 346 - protein, 18 aa, synthetic construct
  REGION 1..18: note = Description of sequence: MC4R agonist
  MOD_RES 1: note = Nle
  MOD_RES 4: note = d-Phenylalanine
  MOD_RES 7: note = 4Abu
  MOD_RES 9: note = Beta-alanine
  REGION 2..8: note = cyclical region
  DISULFID 2..8: note = Cys-Cys bond
  MOD_RES <1: note = Acetylated
  MOD_RES 18: note = NH2
XCHFRWXCARRRRRQRRR

SEQ ID NO: 347 - protein, 20 aa, synthetic construct
  REGION 1..20: note = Description of sequence: MC4R agonist
  MOD_RES 1: note = Nle
  MOD_RES 4: note = d-Phenylalanine
  MOD_RES 9: note = Beta-alanine
  REGION 2..8: note = cyclical region
  DISULFID 2..8: note = Asp-Lys bond
  MOD_RES <1: note = Acetylated
  MOD_RES 20: note = NH2
XDHFRWAKAYGRRRRRQRRR

SEQ ID NO: 348 - protein, 18 aa, synthetic construct
  REGION 1..18: note = Description of sequence: MC4R agonist
  MOD_RES 1: note = Nle
  MOD_RES 4: note = d-Phenylalanine
  MOD_RES 9: note = Beta-alanine
  REGION 2..8: note = cyclical region
  DISULFID 2..8: note = Asp-Lys bond
  MOD_RES <1: note = Acetylated
  MOD_RES 18: note = NH2
XDHFRWAKARRRRRQRRR

SEQ ID NO: 349 - protein, 19 aa, synthetic construct
  REGION 1..19: note = Description of sequence: MC4R agonist
  MOD_RES 1: note = Nle
  MOD_RES 4: note = d-Phenylalanine
  MOD_RES 8: note = Beta-alanine
  REGION 2..7: note = cyclical region
  CROSSLNK 2..7: note = Asp-Lys bond
  MOD_RES <1: note = Acetylated
  MOD_RES 19: note = NH2
XDHFRWKAYGRRRRRQRRR

SEQ ID NO: 350 - protein, 18 aa, synthetic construct
  REGION 1..18: note = Description of sequence: MC4R agonist
  MOD_RES 1: note = Nle
  MOD_RES 4: note = d-Phenylalanine
  MOD_RES 8: note = Beta-alanine
  REGION 2..7: note = cyclical region
  CROSSLNK 2..7: note = Asp-Lys bond
  MOD_RES <1: note = Acetylated
  MOD_RES 18: note = NH2
XDHFRWKAGRRRRRQRRR

SEQ ID NO: 351 - protein, 17 aa, synthetic construct
  REGION 1..17: note = Description of sequence: MC4R agonist
  MOD_RES 1: note = Nle
  MOD_RES 4: note = d-Phenylalanine
  MOD_RES 8: note = Beta-alanine
  REGION 2..7: note = cyclical region
  CROSSLNK 2..7: note = Asp-Lys bond
  MOD_RES <1: note = Acetylated
  MOD_RES 17: note = NH2
XDHFRWKARRRRRQRRR

SEQ ID NO: 352 - protein, 20 aa, synthetic construct
  REGION 1..20: note = Description of sequence: MC4R agonist
  MOD_RES 1: note = Nle
  MOD_RES 4: note = d-Phenylalanine
  MOD_RES 8: note = Beta-alanine
  MOD_RES 9: note = Beta-alanine
  REGION 2..7: note = cyclical region
  CROSSLNK 2..7: note = Asp-Lys bond
  MOD_RES <1: note = Acetylated
  MOD_RES 20: note = NH2
XDHFRWKAAYGRRRRRQRRR

SEQ ID NO: 353 - protein, 19 aa, synthetic construct
  REGION 1..19: note = Description of sequence: MC4R agonist
  MOD_RES 1: note = Nle
  MOD_RES 4: note = d-Phenylalanine
  MOD_RES 8: note = Beta-alanine
  MOD_RES 9: note = Beta-alanine
  REGION 2..7: note = cyclical region
  CROSSLNK 2..7: note = Asp-Lys bond
  MOD_RES <1: note = Acetylated
  MOD_RES 19: note = NH2
XDHFRWKAAGRRRRRQRRR

SEQ ID NO: 354 - protein, 18 aa, synthetic construct
  REGION 1..18: note = Description of sequence: MC4R agonist
  MOD_RES 1: note = Nle
  MOD_RES 4: note = d-Phenylalanine
  MOD_RES 8: note = Beta-alanine
  MOD_RES 9: note = Beta-alanine
  REGION 2..7: note = cyclical region
  CROSSLNK 2..7: note = Asp-Lys bond
  MOD_RES <1: note = Acetylated
  MOD_RES 18: note = NH2
XDHFRWKAARRRRRQRRR

SEQ ID NO: 355 - protein, 19 aa, synthetic construct
  REGION 1..19: note = Description of sequence: MC4R agonist
  MOD_RES 1: note = Nle
  MOD_RES 4: note = d-Phenylalanine
  MOD_RES 8: note = 8-amino-3,6-dioxaoctanoic acid
  REGION 2..7: note = cyclical region
  CROSSLNK 2..7: note = Asp-Lys bond
  MOD_RES <1: note = Acetylated
  MOD_RES 19: note = NH2
XDHFRWKXYGRRRRRQRRR

SEQ ID NO: 356 - protein, 18 aa, synthetic construct
  REGION 1..18: note = Description of sequence: MC4R agonist
  MOD_RES 1: note = Nle
  MOD_RES 4: note = d-Phenylalanine
  MOD_RES 8: note = 8-amino-3,6-dioxaoctanoic acid
  REGION 2..7: note = cyclical region
  CROSSLNK 2..7: note = Asp-Lys bond
  MOD_RES <1: note = Acetylated
  MOD_RES 18: note = NH2
XDHFRWKXGRRRRRQRRR

SEQ ID NO: 357 - protein, 17 aa, synthetic construct
  REGION 1..17: note = Description of sequence: MC4R agonist
  MOD_RES 1: note = Nle
  MOD_RES 4: note = d-Phenylalanine
  MOD_RES 8: note = 8-amino-3,6-dioxaoctanoic acid
  REGION 2..7: note = cyclical region
  CROSSLNK 2..7: note = Asp-Lys bond
  MOD_RES <1: note = Acetylated
  MOD_RES 17: note = NH2
XDHFRWKXRRRRRQRRR

SEQ ID NO: 358 - protein, 20 aa, synthetic construct
  REGION 1..20: note = Description of sequence: MC4R agonist
  MOD_RES 1: note = Nle
  MOD_RES 4: note = d-Phenylalanine
  MOD_RES 8: note = 8-amino-3,6-dioxaoctanoic acid
  MOD_RES 9: note = 8-amino-3,6-dioxaoctanoic acid
  REGION 2..7: note = cyclical region
  CROSSLNK 2..7: note = Asp-Lys bond
  MOD_RES <1: note = Acetylated
  MOD_RES 20: note = NH2
XDHFRWKXXYGRRRRRQRRR

SEQ ID NO: 359 - protein, 19 aa, synthetic construct
  REGION 1..19: note = Description of sequence: MC4R agonist
  MOD_RES 1: note = Nle
  MOD_RES 4: note = d-Phenylalanine
  MOD_RES 8: note = 8-amino-3,6-dioxaoctanoic acid
  MOD_RES 9: note = 8-amino-3,6-dioxaoctanoic acid
  REGION 2..7: note = cyclical region
  CROSSLNK 2..7: note = Asp-Lys bond
  MOD_RES <1: note = Acetylated
  MOD_RES 19: note = NH2
XDHFRWKXXGRRRRRQRRR

SEQ ID NO: 360 - protein, 18 aa, synthetic construct
  REGION 1..18: note = Description of sequence: MC4R agonist
  MOD_RES 1: note = Nle
  MOD_RES 4: note = d-Phenylalanine
  MOD_RES 8: note = 8-amino-3,6-dioxaoctanoic acid
  MOD_RES 9: note = 8-amino-3,6-dioxaoctanoic acid
  REGION 2..7: note = cyclical region
  CROSSLNK 2..7: note = Asp-Lys bond
  MOD_RES <1: note = Acetylated
  MOD_RES 18: note = NH2
XDHFRWKXXRRRRRQRRR

SEQ ID NO: 361 - protein, 20 aa, synthetic construct
  REGION 1..20: note = Description of sequence: MC4R agonist
  MOD_RES 1: note = Nle
  MOD_RES 4: note = d-Phenylalanine
  MOD_RES 8: note = Beta-alanine
  REGION 2..7: note = cyclical region
  CROSSLNK 2..7: note = Asp-Lys bond
  MOD_RES <1: note = Acetylated
  MOD_RES 20: note = NH2
XDHFRWKAYGRRRRRQRRRR

SEQ ID NO: 362 - protein, 19 aa, synthetic construct
  REGION 1..19: note = Description of sequence: MC4R agonist
  MOD_RES 1: note = Nle
  MOD_RES 4: note = d-Phenylalanine
  MOD_RES 8: note = Beta-alanine
  REGION 2..7: note = cyclical region
  CROSSLNK 2..7: note = Asp-Lys bond
  MOD_RES <1: note = Acetylated
  MOD_RES 19: note = NH2
XDHFRWKAGRRRRRQRRRR

SEQ ID NO: 363 - protein, 18 aa, synthetic construct
  REGION 1..18: note = Description of sequence: MC4R agonist
  MOD_RES 1: note = Nle
  MOD_RES 4: note = d-Phenylalanine
  MOD_RES 8: note = Beta-alanine
  REGION 2..7: note = cyclical region
  CROSSLNK 2..7: note = Asp-Lys bond
  MOD_RES <1: note = Acetylated
  MOD_RES 18: note = NH2
XDHFRWKARRRRRQRRRR

SEQ ID NO: 364 - protein, 21 aa, synthetic construct
  REGION 1..21: note = Description of sequence: MC4R agonist
  MOD_RES 1: note = Nle
  MOD_RES 4: note = d-Phenylalanine
  MOD_RES 8: note = Beta-alanine
  MOD_RES 9: note = Beta-alanine
  REGION 2..7: note = cyclical region
  CROSSLNK 2..7: note = Asp-Lys bond
  MOD_RES <1: note = Acetylated
  MOD_RES 21: note = NH2
XDHFRWKAAYGRRRRRQRRRR

SEQ ID NO: 365 - protein, 20 aa, synthetic construct
  REGION 1..20: note = Description of sequence: MC4R agonist
  MOD_RES 1: note = Nle
  MOD_RES 4: note = d-Phenylalanine
  MOD_RES 8: note = Beta-alanine
  MOD_RES 9: note = Beta-alanine
  REGION 2..7: note = cyclical region
  CROSSLNK 2..7: note = Asp-Lys bond
  MOD_RES <1: note = Acetylated
  MOD_RES 20: note = NH2
XDHFRWKAAGRRRRRQRRRR

SEQ ID NO: 366 - protein, 19 aa, synthetic construct
  REGION 1..19: note = Description of sequence: MC4R agonist
  MOD_RES 1: note = Nle
  MOD_RES 4: note = d-Phenylalanine
  MOD_RES 8: note = Beta-alanine
  MOD_RES 9: note = Beta-alanine
  REGION 2..7: note = cyclical region
  CROSSLNK 2..7: note = Asp-Lys bond
  MOD_RES <1: note = Acetylated
  MOD_RES 19: note = NH2
XDHFRWKAARRRRRQRRRR

SEQ ID NO: 367 - protein, 20 aa, synthetic construct
  REGION 1..20: note = Description of sequence: MC4R agonist
  MOD_RES 1: note = Nle
  MOD_RES 4: note = d-Phenylalanine
  MOD_RES 8: note = 8-amino-3,6-dioxaoctanoic acid
  REGION 2..7: note = cyclical region
  CROSSLNK 2..7: note = Asp-Lys bond
  MOD_RES <1: note = Acetylated
  MOD_RES 20: note = NH2
XDHFRWKXYGRRRRRQRRRR

SEQ ID NO: 368 - protein, 19 aa, synthetic construct
  REGION 1..19: note = Description of sequence: MC4R agonist
  MOD_RES 1: note = Nle
  MOD_RES 4: note = d-Phenylalanine
  MOD_RES 8: note = 8-amino-3,6-dioxaoctanoic acid
  REGION 2..7: note = cyclical region
  CROSSLNK 2..7: note = Asp-Lys bond
  MOD_RES <1: note = Acetylated
  MOD_RES 19: note = NH2
XDHFRWKXGRRRRRQRRRR

SEQ ID NO: 369 - protein, 18 aa, synthetic construct
  REGION 1..18: note = Description of sequence: MC4R agonist
  MOD_RES 1: note = Nle
  MOD_RES 4: note = d-Phenylalanine
  MOD_RES 8: note = 8-amino-3,6-dioxaoctanoic acid
  REGION 2..7: note = cyclical region
  CROSSLNK 2..7: note = Asp-Lys bond
  MOD_RES <1: note = Acetylated
  MOD_RES 18: note = NH2
XDHFRWKXRRRRRQRRRR

SEQ ID NO: 370 - protein, 21 aa, synthetic construct
  REGION 1..21: note = Description of sequence: MC4R agonist
  MOD_RES 1: note = Nle
  MOD_RES 4: note = d-Phenylalanine
  MOD_RES 8: note = 8-amino-3,6-dioxaoctanoic acid
  MOD_RES 9: note = 8-amino-3,6-dioxaoctanoic acid
  REGION 2..7: note = cyclical region
  CROSSLNK 2..7: note = Asp-Lys bond
  MOD_RES <1: note = Acetylated
  MOD_RES 21: note = NH2
XDHFRWKXXYGRRRRRQRRRR

SEQ ID NO: 371 - protein, 20 aa, synthetic construct
  REGION 1..20: note = Description of sequence: MC4R agonist
  MOD_RES 1: note = Nle
  MOD_RES 4: note = d-Phenylalanine
  MOD_RES 8: note = 8-amino-3,6-dioxaoctanoic acid
  MOD_RES 9: note = 8-amino-3,6-dioxaoctanoic acid
  REGION 2..7: note = cyclical region
  CROSSLNK 2..7: note = Asp-Lys bond
  MOD_RES <1: note = Acetylated
  MOD_RES 20: note = NH2
XDHFRWKXXGRRRRRQRRRR

SEQ ID NO: 372 - protein, 19 aa, synthetic construct
  REGION 1..19: note = Description of sequence: MC4R agonist
  MOD_RES 1: note = Nle
  MOD_RES 4: note = d-Phenylalanine
  MOD_RES 8: note = 8-amino-3,6-dioxaoctanoic acid
  MOD_RES 9: note = 8-amino-3,6-dioxaoctanoic acid
  REGION 2..7: note = cyclical region
  CROSSLNK 2..7: note = Asp-Lys bond
  MOD_RES <1: note = Acetylated
  MOD_RES 19: note = NH2
XDHFRWKXXRRRRRQRRRR

SEQ ID NO: 373 - protein, 20 aa, synthetic construct
  REGION 1..20: note = Description of sequence: MC4R agonist
  MOD_RES 1: note = Nle
  MOD_RES 4: note = d-Phenylalanine
  MOD_RES 7: note = Beta-alanine
  MOD_RES 9: note = Beta-alanine
  REGION 2..8: note = cyclical region
  CROSSLNK 2..8: note = Asp-Lys bond
  MOD_RES <1: note = Acetylated
  MOD_RES 20: note = NH2
XDHFRWAKAYGRRRRRQRRR

SEQ ID NO: 374 - protein, 18 aa, synthetic construct
  REGION 1..18: note = Description of sequence: MC4R agonist
  MOD_RES 1: note = Nle
  MOD_RES 4: note = d-Phenylalanine
  MOD_RES 7: note = Beta-alanine
  MOD_RES 9: note = Beta-alanine
  REGION 2..8: note = cyclical region
  CROSSLNK 2..8: note = Asp-Lys bond
  MOD_RES <1: note = Acetylated
  MOD_RES 18: note = NH2
XDHFRWAKARRRRRQRRR

SEQ ID NO: 375 - protein, 20 aa, synthetic construct
  REGION 1..20: note = Description of sequence: MC4R agonist
  MOD_RES 1: note = Nle
  MOD_RES 4: note = d-Phenylalanine
  MOD_RES 7: note = 6-aminohexanoic acid
  MOD_RES 9: note = Beta-alanine
  REGION 2..8: note = cyclical region
  CROSSLNK 2..8: note = Cys-Cys bond
  MOD_RES <1: note = Acetylated
  MOD_RES 20: note = NH2
XCHFRWXCAYGRRRRRQRRR

SEQ ID NO: 376 - protein, 18 aa, synthetic construct
  REGION 1..18: note = Description of sequence: MC4R agonist
  MOD_RES 1: note = Nle
  MOD_RES 4: note = d-Phenylalanine
  MOD_RES 7: note = 6-aminohexanoic acid
  MOD_RES 9: note = Beta-alanine
  REGION 2..8: note = cyclical region
  CROSSLNK 2..8: note = Cys-Cys bond
  MOD_RES <1: note = Acetylated
  MOD_RES 18: note = NH2
XCHFRWXCARRRRRQRRR

SEQ ID NO: 377 - protein, 21 aa, synthetic construct
  REGION 1..21: note = Description of sequence: MC4R agonist
  MOD_RES 1: note = d-Phenylalanine
  MOD_RES 4: note = d-Phenylalanine
  MOD_RES 7: note = Beta-alanine
  MOD_RES 8: note = d-Cysteine
  MOD_RES 10: note = Beta-alanine
  REGION 2..8: note = cyclical region
  CROSSLNK 2..8: note = Cys-dCys bond
  MOD_RES 21: note = NH2
FCHFRWACTAYGRRRRRQRRR

SEQ ID NO: 378 - protein, 19 aa, synthetic construct
  REGION 1..19: note = Description of sequence: MC4R agonist
  MOD_RES 1: note = d-Phenylalanine
  MOD_RES 4: note = d-Phenylalanine
  MOD_RES 7: note = Beta-alanine
  MOD_RES 8: note = d-Cysteine
  MOD_RES 10: note = Beta-alanine
  REGION 2..8: note = cyclical region
  CROSSLNK 2..8: note = Cys-dCys bond
  MOD_RES 19: note = NH2
FCHFRWACTARRRRRQRRR

SEQ ID NO: 379 - protein, 20 aa, synthetic construct
  REGION 1..20: note = Description of sequence: MC4R agonist
  MOD_RES 1: note = Nle
  MOD_RES 4: note = d-Phenylalanine
  MOD_RES 7: note = 5-aminopentanoic acid (HN-(CH2)4-C(O)
  MOD_RES 9: note = Beta-alanine
  REGION 2..8: note = cyclical region
  CROSSLNK 2..8: note = Cys-Cys bond
  MOD_RES <1: note = Acetylated
  MOD_RES 20: note = NH2
XCHFRWXCAYGRRRRRQRRR

SEQ ID NO: 380 - protein, 18 aa, synthetic construct
  REGION 1..18: note = Description of sequence: MC4R agonist
  MOD_RES 1: note = Nle
  MOD_RES 4: note = d-Phenylalanine
  MOD_RES 7: note = 5-aminopentanoic acid (HN-(CH2)4-C(O)
  MOD_RES 9: note = Beta-alanine
  REGION 2..8: note = cyclical region
  CROSSLNK 2..8: note = Cys-Cys bond
  MOD_RES <1: note = Acetylated
  MOD_RES 18: note = NH2
XCHFRWXCARRRRRQRRR

SEQ ID NO: 381 - protein, 20 aa, synthetic construct
  REGION 1..20: note = Description of sequence: MC4R agonist
  MOD_RES 1: note = beta-cyclohexylalanine
  MOD_RES 4: note = d-Phenylalanine
  MOD_RES 7: note = 4Abu
  MOD_RES 9: note = Beta-alanine
  REGION 2..8: note = cyclical region
  CROSSLNK 2..8: note = Asp-Lys bond
  MOD_RES <1: note = Acetylated
  MOD_RES 20: note = NH2
XDHFRWXKAYGRRRRRQRRR

SEQ ID NO: 382 - protein, 18 aa, synthetic construct
  REGION 1..18: note = Description of sequence: MC4R agonist
  MOD_RES 1: note = beta-cyclohexylalanine
  MOD_RES 4: note = d-Phenylalanine
  MOD_RES 7: note = 4Abu
  MOD_RES 9: note = Beta-alanine
  REGION 2..8: note = cyclical region
  CROSSLNK 2..8: note = Asp-Lys bond
  MOD_RES <1: note = Acetylated
  MOD_RES 18: note = NH2
XDHFRWXKARRRRRQRRR

SEQ ID NO: 383 - protein, 20 aa, synthetic construct
  REGION 1..20: note = Description of sequence: MC4R agonist
  MOD_RES 1: note = Nle
  MOD_RES 4: note = d-Phenylalanine
  MOD_RES 7: note = 4Abu
  MOD_RES 9: note = Beta-alanine
  REGION 2..8: note = cyclical region
  CROSSLNK 2..8: note = Asp-Lys bond
  MOD_RES <1: note = Acetylated
  MOD_RES 20: note = NH2
XDHFRWXKAYGRRRRRQRRR

SEQ ID NO: 384 - protein, 18 aa, synthetic construct
  REGION 1..18: note = Description of sequence: MC4R agonist
  MOD_RES 1: note = Nle
  MOD_RES 4: note = d-Phenylalanine
  MOD_RES 7: note = 4Abu
  MOD_RES 9: note = Beta-alanine
  REGION 2..8: note = cyclical region
  CROSSLNK 2..8: note = Asp-Lys bond
  MOD_RES <1: note = Acetylated
  MOD_RES 18: note = NH2
XDHFRWXKARRRRRQRRR

SEQ ID NO: 385 - protein, 20 aa, synthetic construct
  REGION 1..20: note = Description of sequence: MC4R agonist
  MOD_RES 1: note = Cyclohexylglycine
  MOD_RES 4: note = d-Phenylalanine
  MOD_RES 7: note = 4Abu
  MOD_RES 9: note = Beta-alanine
  REGION 2..8: note = cyclical region
  CROSSLNK 2..8: note = Asp-Lys bond
  MOD_RES <1: note = Acetylated
  MOD_RES 20: note = NH2
XDHFRWXKAYGRRRRRQRRR

SEQ ID NO: 386 - protein, 18 aa, synthetic construct
  REGION 1..18: note = Description of sequence: MC4R agonist
  MOD_RES 1: note = Cyclohexylglycine
  MOD_RES 4: note = d-Phenylalanine
  MOD_RES 7: note = 4Abu
  MOD_RES 9: note = Beta-alanine
  REGION 2..8: note = cyclical region
  CROSSLNK 2..8: note = Asp-Lys bond
  MOD_RES <1: note = Acetylated
  MOD_RES 18: note = NH2
XDHFRWXKARRRRRQRRR

SEQ ID NO: 387 - protein, 20 aa, synthetic construct
  REGION 1..20: note = Description of sequence: MC4R agonist
  MOD_RES 1: note = hbeta-cyclohexylalanine
  MOD_RES 4: note = d-Phenylalanine
  MOD_RES 7: note = 4Abu
  MOD_RES 9: note = Beta-alanine
  REGION 2..8: note = cyclical region
  CROSSLNK 2..8: note = Asp-Lys bond
  MOD_RES <1: note = Acetylated
  MOD_RES 20: note = NH2
XDHFRWXKAYGRRRRRQRRR

SEQ ID NO: 388 - protein, 18 aa, synthetic construct
  REGION 1..18: note = Description of sequence: MC4R agonist
  MOD_RES 1: note = hbeta-cyclohexylalanine
  MOD_RES 4: note = d-Phenylalanine
  MOD_RES 7: note = 4Abu
  MOD_RES 9: note = Beta-alanine
  REGION 2..8: note = cyclical region
  CROSSLNK 2..8: note = Asp-Lys bond
  MOD_RES <1: note = Acetylated
  MOD_RES 18: note = NH2
XDHFRWXKARRRRRQRRR

SEQ ID NO: 389 - protein, 21 aa, synthetic construct
  REGION 1..21: note = Description of sequence: MC4R agonist
  MOD_RES 1: note = hbeta-cyclohexylalanine
  MOD_RES 4: note = d-Phenylalanine
  MOD_RES 7: note = 4Abu
  MOD_RES 9: note = Beta-alanine
  MOD_RES 10: note = Beta-alanine
  REGION 2..8: note = cyclical region
  CROSSLNK 2..8: note = Asp-Lys bond
  MOD_RES <1: note = Acetylated
  MOD_RES 21: note = NH2
XDHFRWXKAAYGRRRRRQRRR

SEQ ID NO: 390 - protein, 19 aa, synthetic construct
  REGION 1..19: note = Description of sequence: MC4R agonist
  MOD_RES 1: note = hbeta-cyclohexylalanine
  MOD_RES 4: note = d-Phenylalanine
  MOD_RES 7: note = 4Abu
  MOD_RES 9: note = Beta-alanine
  MOD_RES 10: note = Beta-alanine
  REGION 2..8: note = cyclical region
  CROSSLNK 2..8: note = Asp-Lys bond
  MOD_RES <1: note = Acetylated
  MOD_RES 19: note = NH2
XDHFRWXKAARRRRRQRRR

SEQ ID NO: 391 - protein, 20 aa, synthetic construct
  REGION 1..20: note = Description of sequence: MC4R agonist
  MOD_RES 1: note = hbeta-cyclohexylalanine
  MOD_RES 4: note = d-Phenylalanine
  MOD_RES 7: note = 4Abu
  MOD_RES 9: note = 8-amino-3,6-dioxaoctanoic acid
  REGION 2..8: note = cyclical region
  CROSSLNK 2..8: note = Asp-Lys bond
  MOD_RES <1: note = Acetylated
  MOD_RES 20: note = NH2
XDHFRWXKXYGRRRRRQRRR

SEQ ID NO: 392 - protein, 18 aa, synthetic construct
  REGION 1..18: note = Description of sequence: MC4R agonist
  MOD_RES 1: note = hbeta-cyclohexylalanine
  MOD_RES 4: note = d-Phenylalanine
  MOD_RES 7: note = 4Abu
  MOD_RES 9: note = 8-amino-3,6-dioxaoctanoic acid
  REGION 2..8: note = cyclical region
  CROSSLNK 2..8: note = Asp-Lys bond
  MOD_RES <1: note = Acetylated
  MOD_RES 18: note = NH2
XDHFRWXKXRRRRRQRRR

SEQ ID NO: 393 - protein, 21 aa, synthetic construct
  REGION 1..21: note = Description of sequence: MC4R agonist
  MOD_RES 1: note = hbeta-cyclohexylalanine
  MOD_RES 4: note = d-Phenylalanine
  MOD_RES 7: note = 4Abu
  MOD_RES 9: note = 8-amino-3,6-dioxaoctanoic acid
  MOD_RES 10: note = 8-amino-3,6-dioxaoctanoic acid
  REGION 2..8: note = cyclical region
  CROSSLNK 2..8: note = Asp-Lys bond
  MOD_RES <1: note = Acetylated
  MOD_RES 21: note = NH2
XDHFRWXKXXYGRRRRRQRRR

SEQ ID NO: 394 - protein, 19 aa, synthetic construct
  REGION 1..19: note = Description of sequence: MC4R agonist
  MOD_RES 1: note = hbeta-cyclohexylalanine
  MOD_RES 4: note = d-Phenylalanine
  MOD_RES 7: note = 4Abu
  MOD_RES 9: note = 8-amino-3,6-dioxaoctanoic acid
  MOD_RES 10: note = 8-amino-3,6-dioxaoctanoic acid
  REGION 2..8: note = cyclical region
  CROSSLNK 2..8: note = Asp-Lys bond
  MOD_RES <1: note = Acetylated
  MOD_RES 19: note = NH2
XDHFRWXKXXRRRRRQRRR

SEQ ID NO: 395 - protein, 21 aa, synthetic construct
  REGION 1..21: note = Description of sequence: MC4R agonist
  MOD_RES 1: note = hbeta-cyclohexylalanine
  MOD_RES 4: note = d-Phenylalanine
  MOD_RES 7: note = 4Abu
  MOD_RES 9: note = Beta-alanine
  REGION 2..8: note = cyclical region
  CROSSLNK 2..8: note = Asp-Lys bond
  MOD_RES <1: note = Acetylated
  MOD_RES 21: note = NH2
XDHFRWXKAYGRRRRRQRRRR

SEQ ID NO: 396 - protein, 19 aa, synthetic construct
  REGION 1..19: note = Description of sequence: MC4R agonist
  MOD_RES 1: note = hbeta-cyclohexylalanine
  MOD_RES 4: note = d-Phenylalanine
  MOD_RES 7: note = 4Abu
  MOD_RES 9: note = Beta-alanine
  REGION 2..8: note = cyclical region
  CROSSLNK 2..8: note = Asp-Lys bond
  MOD_RES <1: note = Acetylated
  MOD_RES 19: note = NH2
XDHFRWXKARRRRRQRRRR

SEQ ID NO: 397 - protein, 22 aa, synthetic construct
  REGION 1..22: note = Description of sequence: MC4R agonist
  MOD_RES 1: note = hbeta-cyclohexylalanine
  MOD_RES 4: note = d-Phenylalanine
  MOD_RES 7: note = 4Abu
  MOD_RES 9: note = Beta-alanine
  MOD_RES 10: note = Beta-alanine
  REGION 2..8: note = cyclical region
  CROSSLNK 2..8: note = Asp-Lys bond
  MOD_RES <1: note = Acetylated
  MOD_RES 22: note = NH2
XDHFRWXKAAYGRRRRRQRRRR

SEQ ID NO: 398 - protein, 20 aa, synthetic construct
  REGION 1..20: note = Description of sequence: MC4R agonist
  MOD_RES 1: note = hbeta-cyclohexylalanine
  MOD_RES 4: note = d-Phenylalanine
  MOD_RES 7: note = 4Abu
  MOD_RES 9: note = Beta-alanine
  MOD_RES 10: note = Beta-alanine
  REGION 2..8: note = cyclical region
  CROSSLNK 2..8: note = Asp-Lys bond
  MOD_RES <1: note = Acetylated
  MOD_RES 20: note = NH2
XDHFRWXKAARRRRRQRRRR

SEQ ID NO: 399 - protein, 21 aa, synthetic construct
  REGION 1..21: note = Description of sequence: MC4R agonist
  MOD_RES 1: note = hbeta-cyclohexylalanine
  MOD_RES 4: note = d-Phenylalanine
  MOD_RES 7: note = 4Abu
  MOD_RES 9: note = 8-amino-3,6-dioxaoctanoic acid
  REGION 2..8: note = cyclical region
  CROSSLNK 2..8: note = Asp-Lys bond
  MOD_RES <1: note = Acetylated
  MOD_RES 21: note = NH2
XDHFRWXKXYGRRRRRQRRRR

SEQ ID NO: 400 - protein, 19 aa, synthetic construct
  REGION 1..19: note = Description of sequence: MC4R agonist
  MOD_RES 1: note = hbeta-cyclohexylalanine
  MOD_RES 4: note = d-Phenylalanine
  MOD_RES 7: note = 4Abu
  MOD_RES 9: note = 8-amino-3,6-dioxaoctanoic acid
  REGION 2..8: note = cyclical region
  CROSSLNK 2..8: note = Asp-Lys bond
  MOD_RES <1: note = Acetylated
  MOD_RES 19: note = NH2
XDHFRWXKXRRRRRQRRRR

SEQ ID NO: 401 - protein, 22 aa, synthetic construct
  REGION 1..22: note = Description of sequence: MC4R agonist
  MOD_RES 1: note = hbeta-cyclohexylalanine
  MOD_RES 4: note = d-Phenylalanine
  MOD_RES 7: note = 4Abu
  MOD_RES 9: note = 8-amino-3,6-dioxaoctanoic acid
  MOD_RES 10: note = 8-amino-3,6-dioxaoctanoic acid
  REGION 2..8: note = cyclical region
  CROSSLNK 2..8: note = Asp-Lys bond
  MOD_RES <1: note = Acetylated
  MOD_RES 22: note = NH2
XDHFRWXKXXYGRRRRRQRRRR

SEQ ID NO: 402 - protein, 20 aa, synthetic construct
  REGION 1..20: note = Description of sequence: MC4R agonist
  MOD_RES 1: note = hbeta-cyclohexylalanine
  MOD_RES 4: note = d-Phenylalanine
  MOD_RES 7: note = 4Abu
  MOD_RES 9: note = 8-amino-3,6-dioxaoctanoic acid
  MOD_RES 10: note = 8-amino-3,6-dioxaoctanoic acid
  REGION 2..8: note = cyclical region
  CROSSLNK 2..8: note = Asp-Lys bond
  MOD_RES <1: note = Acetylated
  MOD_RES 20: note = NH2
XDHFRWXKXXRRRRRQRRRR

SEQ ID NO: 403 - protein, 20 aa, synthetic construct
  REGION 1..20: note = Description of sequence: MC4R agonist
  MOD_RES 1: note = dCyclohexylglycine
  MOD_RES 4: note = d-Phenylalanine
  MOD_RES 7: note = 4Abu
  MOD_RES 9: note = Beta-alanine
  REGION 2..8: note = cyclical region
  CROSSLNK 2..8: note = Asp-Lys bond
  MOD_RES <1: note = Acetylated
  MOD_RES 20: note = NH2
XDHFRWXKAYGRRRRRQRRR

SEQ ID NO: 404 - protein, 18 aa, synthetic construct
  REGION 1..18: note = Description of sequence: MC4R agonist
  MOD_RES 1: note = dCyclohexylglycine
  MOD_RES 4: note = d-Phenylalanine
  MOD_RES 7: note = 4Abu
  MOD_RES 9: note = Beta-alanine
  REGION 2..8: note = cyclical region
  CROSSLNK 2..8: note = Asp-Lys bond
  MOD_RES <1: note = Acetylated
  MOD_RES 18: note = NH2
XDHFRWXKARRRRRQRRR

SEQ ID NO: 405 - protein, 20 aa, synthetic construct
  REGION 1..20: note = Description of sequence: MC4R agonist
  MOD_RES 1: note = homophenylalanine
  MOD_RES 4: note = d-Phenylalanine
  MOD_RES 7: note = 4Abu
  MOD_RES 9: note = Beta-alanine
  REGION 2..8: note = cyclical region
  CROSSLNK 2..8: note = Asp-Lys bond
  MOD_RES <1: note = Acetylated
  MOD_RES 20: note = NH2
FDHFRWXKAYGRRRRRQRRR

SEQ ID NO: 406 - protein, 18 aa, synthetic construct
  REGION 1..18: note = Description of sequence: MC4R agonist
  MOD_RES 1: note = homophenylalanine
  MOD_RES 4: note = d-Phenylalanine
  MOD_RES 7: note = 4Abu
  MOD_RES 9: note = Beta-alanine
  REGION 2..8: note = cyclical region
  CROSSLNK 2..8: note = Asp-Lys bond
  MOD_RES <1: note = Acetylated
  MOD_RES 18: note = NH2
FDHFRWXKARRRRRQRRR

SEQ ID NO: 407 - protein, 20 aa, synthetic construct
  REGION 1..20: note = Description of sequence: MC4R agonist
  MOD_RES 1: note = Nle
  MOD_RES 4: note = d-Phenylalanine
  MOD_RES 6: note = d-Tryptophan
  MOD_RES 7: note = 5-aminopentanoic acid (HN-(CH2)4-C(O)
  MOD_RES 9: note = Beta-alanine
  REGION 2..8: note = cyclical region
  DISULFID 2..8: note = Cys-Cys bond
  MOD_RES <1: note = Acetylated
  MOD_RES 20: note = NH2
XCHFRWXCAYGRRRRRQRRR

SEQ ID NO: 408 - protein, 18 aa, synthetic construct
  REGION 1..18: note = Description of sequence: MC4R agonist
  MOD_RES 1: note = Nle
  MOD_RES 4: note = d-Phenylalanine
  MOD_RES 6: note = d-Tryptophan
  MOD_RES 7: note = 5-aminopentanoic acid (HN-(CH2)4-C(O)
  MOD_RES 9: note = Beta-alanine
  REGION 2..8: note = cyclical region
  DISULFID 2..8: note = Cys-Cys bond
  MOD_RES <1: note = Acetylated
  MOD_RES 18: note = NH2
XCHFRWXCARRRRRQRRR

SEQ ID NO: 409 - protein, 20 aa, synthetic construct
  REGION 1..20: note = Description of sequence: MC4R agonist
  MOD_RES 1: note = Nle
  MOD_RES 4: note = d-Phenylalanine
  MOD_RES 6: note = d-Tryptophan
  MOD_RES 7: note = 6-aminohexanoic acid
  MOD_RES 9: note = Beta-alanine
  REGION 2..8: note = cyclical region
  DISULFID 2..8: note = Cys-Cys bond
  MOD_RES <1: note = Acetylated
  MOD_RES 20: note = NH2
XCHFRWXCAYGRRRRRQRRR

SEQ ID NO: 410 - protein, 18 aa, synthetic construct
  REGION 1..18: note = Description of sequence: MC4R agonist
  MOD_RES 1: note = Nle
  MOD_RES 4: note = d-Phenylalanine
  MOD_RES 6: note = d-Tryptophan
  MOD_RES 7: note = 6-aminohexanoic acid
  MOD_RES 9: note = Beta-alanine
  REGION 2..8: note = cyclical region
  DISULFID 2..8: note = Cys-Cys bond
  MOD_RES <1: note = Acetylated
  MOD_RES 18: note = NH2
XCHFRWXCARRRRRQRRR

SEQ ID NO: 411 - protein, 20 aa, synthetic construct
  REGION 1..20: note = Description of sequence: MC4R agonist
  MOD_RES 1: note = Nle
  MOD_RES 4: note = d-Phenylalanine
  MOD_RES 6: note = d-Tryptophan
  MOD_RES 7: note = Beta-alanine
  MOD_RES 9: note = Beta-alanine
  REGION 2..8: note = cyclical region
  DISULFID 2..8: note = Cys-Cys bond
  MOD_RES <1: note = Acetylated
  MOD_RES 20: note = NH2
XCHFRWACAYGRRRRRQRRR

SEQ ID NO: 412 - protein, 18 aa, synthetic construct
  REGION 1..18: note = Description of sequence: MC4R agonist
  MOD_RES 1: note = Nle
  MOD_RES 4: note = d-Phenylalanine
  MOD_RES 6: note = d-Tryptophan
  MOD_RES 7: note = Beta-alanine
  MOD_RES 9: note = Beta-alanine
  REGION 2..8: note = cyclical region
  DISULFID 2..8: note = Cys-Cys bond
  MOD_RES <1: note = Acetylated
  MOD_RES 18: note = NH2
XCHFRWACARRRRRQRRR

SEQ ID NO: 413 - protein, 20 aa, synthetic construct
  REGION 1..20: note = Description of sequence: MC4R agonist
  MOD_RES 1: note = Nle
  MOD_RES 3: note = d-Alanine
  MOD_RES 5: note = d-Phenylalanine
  MOD_RES 8: note = Penicillamine
  MOD_RES 9: note = Beta-alanine
  REGION 2..8: note = cyclical region
  CROSSLNK 2..8: note = Cys-Pen bond
  MOD_RES <1: note = Acetylated
  MOD_RES 20: note = NH2
XCAHFRWXAYGRRRRRQRRR

SEQ ID NO: 414 - protein, 19 aa, synthetic construct
  REGION 1..19: note = Description of sequence: MC4R agonist
  MOD_RES 1: note = Nle
  MOD_RES 3: note = d-Alanine
  MOD_RES 5: note = d-Phenylalanine
  MOD_RES 8: note = Penicillamine
  MOD_RES 9: note = Beta-alanine
  REGION 2..8: note = cyclical region
  CROSSLNK 2..8: note = Cys-Pen bond
  MOD_RES <1: note = Acetylated
  MOD_RES 19: note = NH2
XCAHFRWXAGRRRRRQRRR

SEQ ID NO: 415 - protein, 18 aa, synthetic construct
  REGION 1..18: note = Description of sequence: MC4R agonist
  MOD_RES 1: note = Nle
  MOD_RES 3: note = d-Alanine
  MOD_RES 5: note = d-Phenylalanine
  MOD_RES 8: note = Penicillamine
  MOD_RES 9: note = Beta-alanine
  REGION 2..8: note = cyclical region
  CROSSLNK 2..8: note = Cys-Pen bond
  MOD_RES <1: note = Acetylated
  MOD_RES 18: note = NH2
XCAHFRWXARRRRRQRRR

SEQ ID NO: 416 - protein, 21 aa, synthetic construct
  REGION 1..21: note = Description of sequence: MC4R agonist
  MOD_RES 1: note = Nle
  MOD_RES 3: note = d-Alanine
  MOD_RES 5: note = d-Phenylalanine
  MOD_RES 8: note = Penicillamine
  MOD_RES 9: note = Beta-alanine
  MOD_RES 10: note = Beta-alanine
  REGION 2..8: note = cyclical region
  CROSSLNK 2..8: note = Cys-Pen bond
  MOD_RES <1: note = Acetylated
  MOD_RES 21: note = NH2
XCAHFRWXAAYGRRRRRQRRR

SEQ ID NO: 417 - protein, 20 aa, synthetic construct
  REGION 1..20: note = Description of sequence: MC4R agonist
  MOD_RES 1: note = Nle
  MOD_RES 3: note = d-Alanine
  MOD_RES 5: note = d-Phenylalanine
  MOD_RES 8: note = Penicillamine
  MOD_RES 9: note = Beta-alanine
  MOD_RES 10: note = Beta-alanine
  REGION 2..8: note = cyclical region
  CROSSLNK 2..8: note = Cys-Pen bond
  MOD_RES <1: note = Acetylated
  MOD_RES 20: note = NH2
XCAHFRWXAAGRRRRRQRRR

SEQ ID NO: 418 - protein, 19 aa, synthetic construct
  REGION 1..19: note = Description of sequence: MC4R agonist
  MOD_RES 1: note = Nle
  MOD_RES 3: note = d-Alanine
  MOD_RES 5: note = d-Phenylalanine
  MOD_RES 8: note = Penicillamine
  MOD_RES 9: note = Beta-alanine
  MOD_RES 10: note = Beta-alanine
  REGION 2..8: note = cyclical region
  CROSSLNK 2..8: note = Cys-Pen bond
  MOD_RES <1: note = Acetylated
  MOD_RES 19: note = NH2
XCAHFRWXAARRRRRQRRR

SEQ ID NO: 419 - protein, 20 aa, synthetic construct
  REGION 1..20: note = Description of sequence: MC4R agonist
  MOD_RES 1: note = Nle
  MOD_RES 3: note = d-Alanine
  MOD_RES 5: note = d-Phenylalanine
  MOD_RES 8: note = Penicillamine
  MOD_RES 9: note = 8-amino-3,6-dioxaoctanoic acid
  REGION 2..8: note = cyclical region
  CROSSLNK 2..8: note = Cys-Pen bond
  MOD_RES <1: note = Acetylated
  MOD_RES 20: note = NH2
XCAHFRWXXYGRRRRRQRRR

SEQ ID NO: 420 - protein, 19 aa, synthetic construct
  REGION 1..19: note = Description of sequence: MC4R agonist
  MOD_RES 1: note = Nle
  MOD_RES 3: note = d-Alanine
  MOD_RES 5: note = d-Phenylalanine
  MOD_RES 8: note = Penicillamine
  MOD_RES 9: note = 8-amino-3,6-dioxaoctanoic acid
  REGION 2..8: note = cyclical region
  CROSSLNK 2..8: note = Cys-Pen bond
  MOD_RES <1: note = Acetylated
  MOD_RES 19: note = NH2
XCAHFRWXXGRRRRRQRRR

SEQ ID NO: 421 - protein, 18 aa, synthetic construct
  REGION 1..18: note = Description of sequence: MC4R agonist
  MOD_RES 1: note = Nle
  MOD_RES 3: note = d-Alanine
  MOD_RES 5: note = d-Phenylalanine
  MOD_RES 8: note = Penicillamine
  MOD_RES 9: note = 8-amino-3,6-dioxaoctanoic acid
  REGION 2..8: note = cyclical region
  CROSSLNK 2..8: note = Cys-Pen bond
  MOD_RES <1: note = Acetylated
  MOD_RES 18: note = NH2
XCAHFRWXXRRRRRQRRR

SEQ ID NO: 422 - protein, 21 aa, synthetic construct
  REGION 1..21: note = Description of sequence: MC4R agonist
  MOD_RES 1: note = Nle
  MOD_RES 3: note = d-Alanine
  MOD_RES 5: note = d-Phenylalanine
  MOD_RES 8: note = Penicillamine
  MOD_RES 9: note = 8-amino-3,6-dioxaoctanoic acid
  MOD_RES 10: note = 8-amino-3,6-dioxaoctanoic acid
  REGION 2..8: note = cyclical region
  CROSSLNK 2..8: note = Cys-Pen bond
  MOD_RES <1: note = Acetylated
  MOD_RES 21: note = NH2
XCAHFRWXXXYGRRRRRQRRR

SEQ ID NO: 423 - protein, 20 aa, synthetic construct
  REGION 1..20: note = Description of sequence: MC4R agonist
  MOD_RES 1: note = Nle
  MOD_RES 3: note = d-Alanine
  MOD_RES 5: note = d-Phenylalanine
  MOD_RES 8: note = Penicillamine
  MOD_RES 9: note = 8-amino-3,6-dioxaoctanoic acid
  MOD_RES 10: note = 8-amino-3,6-dioxaoctanoic acid
  REGION 2..8: note = cyclical region
  CROSSLNK 2..8: note = Cys-Pen bond
  MOD_RES <1: note = Acetylated
  MOD_RES 20: note = NH2
XCAHFRWXXXGRRRRRQRRR

SEQ ID NO: 424 - protein, 19 aa, synthetic construct
  REGION 1..19: note = Description of sequence: MC4R agonist
  MOD_RES 1: note = Nle
  MOD_RES 3: note = d-Alanine
  MOD_RES 5: note = d-Phenylalanine
  MOD_RES 8: note = Penicillamine
  MOD_RES 9: note = 8-amino-3,6-dioxaoctanoic acid
  MOD_RES 10: note = 8-amino-3,6-dioxaoctanoic acid
  REGION 2..8: note = cyclical region
  CROSSLNK 2..8: note = Cys-Pen bond
  MOD_RES <1: note = Acetylated
  MOD_RES 19: note = NH2
XCAHFRWXXXRRRRRQRRR

SEQ ID NO: 425 - protein, 20 aa, synthetic construct
  REGION 1..20: note = Description of sequence: MC4R agonist
  MOD_RES 1: note = d-Phenylalanine
  MOD_RES 4: note = D-ethyl-tyrosine
  MOD_RES 7: note = Beta-alanine
  MOD_RES 8: note = d-Cysteine
  MOD_RES 9: note = Beta-alanine
  REGION 2..8: note = cyclical region
  DISULFID 2..8: note = Cys-dCys bond
  MOD_RES 20: note = NH2
FCHYRWACAYGRRRRRQRRR

SEQ ID NO: 426 - protein, 18 aa, synthetic construct
  REGION 1..18: note = Description of sequence: MC4R agonist
  MOD_RES 1: note = d-Phenylalanine
  MOD_RES 4: note = D-ethyl-tyrosine
  MOD_RES 7: note = Beta-alanine
  MOD_RES 8: note = d-Cysteine
  MOD_RES 9: note = Beta-alanine
  REGION 2..8: note = cyclical region
  DISULFID 2..8: note = Cys-dCys bond
  MOD_RES 18: note = NH2
FCHYRWACARRRRRQRRR

SEQ ID NO: 427 - protein, 19 aa, synthetic construct
  REGION 1..19: note = Description of sequence: MC4R agonist
  MOD_RES 1: note = d-Phenylalanine
  MOD_RES 4: note = D-ethyl-tyrosine
  MOD_RES 7: note = Beta-alanine
  MOD_RES 8: note = d-Cysteine
  MOD_RES 9: note = Beta-alanine
  REGION 2..8: note = cyclical region
  DISULFID 2..8: note = Cys-dCys bond
  MOD_RES 19: note = NH2
FCHYRWACAGRRRRRQRRR

SEQ ID NO: 428 - protein, 19 aa, synthetic construct
  REGION 1..19: note = Description of sequence: MC4R agonist
  MOD_RES 1: note = d-Phenylalanine
  MOD_RES 4: note = D-ethyl-tyrosine
  MOD_RES 7: note = Beta-alanine
  MOD_RES 8: note = d-Cysteine
  MOD_RES 9: note = Beta-alanine
  REGION 2..8: note = cyclical region
  DISULFID 2..8: note = Cys-dCys bond
  MOD_RES 19: note = NH2
FCHYRWACARRRRRQRRRR

SEQ ID NO: 429 - protein, 21 aa, synthetic construct
  REGION 1..21: note = Description of sequence: MC4R agonist
  MOD_RES 1: note = d-Phenylalanine
  MOD_RES 4: note = D-ethyl-tyrosine
  MOD_RES 7: note = Beta-alanine
  MOD_RES 8: note = d-Cysteine
  MOD_RES 9: note = Beta-alanine
  MOD_RES 10: note = Beta-alanine
  REGION 2..8: note = cyclical region
  DISULFID 2..8: note = Cys-dCys bond
  MOD_RES 21: note = NH2
FCHYRWACAAYGRRRRRQRRR

SEQ ID NO: 430 - protein, 19 aa, synthetic construct
  REGION 1..19: note = Description of sequence: MC4R agonist
  MOD_RES 1: note = d-Phenylalanine
  MOD_RES 4: note = D-ethyl-tyrosine
  MOD_RES 7: note = Beta-alanine
  MOD_RES 8: note = d-Cysteine
  MOD_RES 9: note = Beta-alanine
  MOD_RES 10: note = Beta-alanine
  REGION 2..8: note = cyclical region
  DISULFID 2..8: note = Cys-dCys bond
  MOD_RES 19: note = NH2
FCHYRWACAARRRRRQRRR

SEQ ID NO: 431 - protein, 20 aa, synthetic construct
  REGION 1..20: note = Description of sequence: MC4R agonist
  MOD_RES 1: note = d-Phenylalanine
  MOD_RES 4: note = D-ethyl-tyrosine
  MOD_RES 7: note = Beta-alanine
  MOD_RES 8: note = d-Cysteine
  MOD_RES 9: note = Beta-alanine
  MOD_RES 10: note = Beta-alanine
  REGION 2..8: note = cyclical region
  DISULFID 2..8: note = Cys-dCys bond
  MOD_RES 20: note = NH2
FCHYRWACAAGRRRRRQRRR

SEQ ID NO: 432 - protein, 20 aa, synthetic construct
  REGION 1..20: note = Description of sequence: MC4R agonist
  MOD_RES 1: note = d-Phenylalanine
  MOD_RES 4: note = D-ethyl-tyrosine
  MOD_RES 7: note = Beta-alanine
  MOD_RES 8: note = d-Cysteine
  MOD_RES 9: note = Beta-alanine
  MOD_RES 10: note = Beta-alanine
  REGION 2..8: note = cyclical region
  DISULFID 2..8: note = Cys-dCys bond
  MOD_RES 20: note = NH2
FCHYRWACAARRRRRQRRRR

SEQ ID NO: 433 - protein, 20 aa, synthetic construct
  REGION 1..20: note = Description of sequence: MC4R agonist
  MOD_RES 1: note = d-Phenylalanine
  MOD_RES 4: note = D-ethyl-tyrosine
  MOD_RES 7: note = Beta-alanine
  MOD_RES 8: note = d-Cysteine
  MOD_RES 9: note = 8-amino-3,6-dioxaoctanoic acid
  REGION 2..8: note = cyclical region
  DISULFID 2..8: note = Cys-dCys bond
  MOD_RES 20: note = NH2
FCHYRWACXYGRRRRRQRRR

SEQ ID NO: 434 - protein, 18 aa, synthetic construct
  REGION 1..18: note = Description of sequence: MC4R agonist
  MOD_RES 1: note = d-Phenylalanine
  MOD_RES 4: note = D-ethyl-tyrosine
  MOD_RES 7: note = Beta-alanine
  MOD_RES 8: note = d-Cysteine
  MOD_RES 9: note = 8-amino-3,6-dioxaoctanoic acid
  REGION 2..8: note = cyclical region
  DISULFID 2..8: note = Cys-dCys bond
  MOD_RES 18: note = NH2
FCHYRWACXRRRRRQRRR

SEQ ID NO: 435 - protein, 19 aa, synthetic construct
  REGION 1..19: note = Description of sequence: MC4R agonist
  MOD_RES 1: note = d-Phenylalanine
  MOD_RES 4: note = D-ethyl-tyrosine
  MOD_RES 7: note = Beta-alanine
  MOD_RES 8: note = d-Cysteine
  MOD_RES 9: note = 8-amino-3,6-dioxaoctanoic acid
  REGION 2..8: note = cyclical region
  DISULFID 2..8: note = Cys-dCys bond
  MOD_RES 19: note = NH2
FCHYRWACXGRRRRRQRRR

SEQ ID NO: 436 - protein, 19 aa, synthetic construct
  REGION 1..19: note = Description of sequence: MC4R agonist
  MOD_RES 1: note = d-Phenylalanine
  MOD_RES 4: note = D-ethyl-tyrosine
  MOD_RES 7: note = Beta-alanine
  MOD_RES 8: note = d-Cysteine
  MOD_RES 9: note = 8-amino-3,6-dioxaoctanoic acid
  REGION 2..8: note = cyclical region
  DISULFID 2..8: note = Cys-dCys bond
  MOD_RES 19: note = NH2
FCHYRWACXRRRRRQRRRR

SEQ ID NO: 437 - protein, 21 aa, synthetic construct
  REGION 1..21: note = Description of sequence: MC4R agonist
  MOD_RES 1: note = d-Phenylalanine
  MOD_RES 4: note = D-ethyl-tyrosine
  MOD_RES 7: note = Beta-alanine
  MOD_RES 8: note = d-Cysteine
  MOD_RES 9: note = 8-amino-3,6-dioxaoctanoic acid
  MOD_RES 10: note = 8-amino-3,6-dioxaoctanoic acid
  REGION 2..8: note = cyclical region
  DISULFID 2..8: note = Cys-dCys bond
  MOD_RES 21: note = NH2
FCHYRWACXXYGRRRRRQRRR

SEQ ID NO: 438 - protein, 19 aa, synthetic construct
  REGION 1..19: note = Description of sequence: MC4R agonist
  MOD_RES 1: note = d-Phenylalanine
  MOD_RES 4: note = D-ethyl-tyrosine
  MOD_RES 7: note = Beta-alanine
  MOD_RES 8: note = d-Cysteine
  MOD_RES 9: note = 8-amino-3,6-dioxaoctanoic acid
  MOD_RES 10: note = 8-amino-3,6-dioxaoctanoic acid
  REGION 2..8: note = cyclical region
  DISULFID 2..8: note = Cys-dCys bond
  MOD_RES 19: note = NH2
FCHYRWACXXRRRRRQRRR

SEQ ID NO: 439 - protein, 20 aa, synthetic construct
  REGION 1..20: note = Description of sequence: MC4R agonist
  MOD_RES 1: note = d-Phenylalanine
  MOD_RES 4: note = D-ethyl-tyrosine
  MOD_RES 7: note = Beta-alanine
  MOD_RES 8: note = d-Cysteine
  MOD_RES 9: note = 8-amino-3,6-dioxaoctanoic acid
  MOD_RES 10: note = 8-amino-3,6-dioxaoctanoic acid
  REGION 2..8: note = cyclical region
  DISULFID 2..8: note = Cys-dCys bond
  MOD_RES 20: note = NH2
FCHYRWACXXGRRRRRQRRR

SEQ ID NO: 440 - protein, 20 aa, synthetic construct
  REGION 1..20: note = Description of sequence: MC4R agonist
  MOD_RES 1: note = d-Phenylalanine
  MOD_RES 4: note = D-ethyl-tyrosine
  MOD_RES 7: note = Beta-alanine
  MOD_RES 8: note = d-Cysteine
  MOD_RES 9: note = 8-amino-3,6-dioxaoctanoic acid
  MOD_RES 10: note = 8-amino-3,6-dioxaoctanoic acid
  REGION 2..8: note = cyclical region
  DISULFID 2..8: note = Cys-dCys bond
  MOD_RES 20: note = NH2
FCHYRWACXXRRRRRQRRRR

SEQ ID NO: 441 - protein, 21 aa, synthetic construct
  REGION 1..21: note = Description of sequence: MC4R agonist
  MOD_RES 1: note = d-Phenylalanine
  MOD_RES 4: note = D-ethyl-tyrosine
  MOD_RES 5: note = Homoarginine
  MOD_RES 7: note = Beta-alanine
  MOD_RES 8: note = d-Cysteine
  MOD_RES 10: note = Beta-alanine
  REGION 2..8: note = cyclical region
  DISULFID 2..8: note = Cys-dCys bond
  MOD_RES 21: note = NH2
FCHYRWACTAYGRRRRRQRRR

SEQ ID NO: 442 - protein, 19 aa, synthetic construct
  REGION 1..19: note = Description of sequence: MC4R agonist
  MOD_RES 1: note = d-Phenylalanine
  MOD_RES 4: note = D-ethyl-tyrosine
  MOD_RES 5: note = Homoarginine
  MOD_RES 7: note = Beta-alanine
  MOD_RES 8: note = d-Cysteine
  MOD_RES 10: note = Beta-alanine
  REGION 2..8: note = cyclical region
  DISULFID 2..8: note = Cys-dCys bond
  MOD_RES 19: note = NH2
FCHYRWACTARRRRRQRRR

SEQ ID NO: 443 - protein, 22 aa, synthetic construct
  REGION 1..22: note = Description of sequence: MC4R agonist
  MOD_RES 1: note = d-Phenylalanine
  MOD_RES 4: note = D-ethyl-tyrosine
  MOD_RES 5: note = Homoarginine
  MOD_RES 7: note = Beta-alanine
  MOD_RES 8: note = d-Cysteine
  MOD_RES 10: note = Beta-alanine
  MOD_RES 11: note = Beta-alanine
  REGION 2..8: note = cyclical region
  DISULFID 2..8: note = Cys-dCys bond
  MOD_RES 22: note = NH2
FCHYRWACTAAYGRRRRRQRRR

SEQ ID NO: 444 - protein, 20 aa, synthetic construct
  REGION 1..20: note = Description of sequence: MC4R agonist
  MOD_RES 1: note = d-Phenylalanine
  MOD_RES 4: note = D-ethyl-tyrosine
  MOD_RES 5: note = Homoarginine
  MOD_RES 7: note = Beta-alanine
  MOD_RES 8: note = d-Cysteine
  MOD_RES 10: note = Beta-alanine
  MOD_RES 11: note = Beta-alanine
  REGION 2..8: note = cyclical region
  DISULFID 2..8: note = Cys-dCys bond
  MOD_RES 20: note = NH2
FCHYRWACTAARRRRRQRRR

SEQ ID NO: 445 - protein, 21 aa, synthetic construct
  REGION 1..21: note = Description of sequence: MC4R agonist
  MOD_RES 1: note = d-Phenylalanine
  MOD_RES 4: note = D-ethyl-tyrosine
  MOD_RES 5: note = Homoarginine
  MOD_RES 7: note = Beta-alanine
  MOD_RES 8: note = d-Cysteine
  MOD_RES 10: note = 8-amino-3,6-dioxaoctanoic acid
  REGION 2..8: note = cyclical region
  DISULFID 2..8: note = Cys-dCys bond
  MOD_RES 21: note = NH2
FCHYRWACTXYGRRRRRQRRR

SEQ ID NO: 446 - protein, 19 aa, synthetic construct
  REGION 1..19: note = Description of sequence: MC4R agonist
  MOD_RES 1: note = d-Phenylalanine
  MOD_RES 4: note = D-ethyl-tyrosine
  MOD_RES 5: note = Homoarginine
  MOD_RES 7: note = Beta-alanine
  MOD_RES 8: note = d-Cysteine
  MOD_RES 10: note = 8-amino-3,6-dioxaoctanoic acid
  REGION 2..8: note = cyclical region
  DISULFID 2..8: note = Cys-dCys bond
  MOD_RES 19: note = NH2
FCHYRWACTXRRRRRQRRR

SEQ ID NO: 447 - protein, 22 aa, synthetic construct
  REGION 1..22: note = Description of sequence: MC4R agonist
  MOD_RES 1: note = d-Phenylalanine
  MOD_RES 4: note = D-ethyl-tyrosine
  MOD_RES 5: note = Homoarginine
  MOD_RES 7: note = Beta-alanine
  MOD_RES 8: note = d-Cysteine
  MOD_RES 10: note = 8-amino-3,6-dioxaoctanoic acid
  MOD_RES 11: note = 8-amino-3,6-dioxaoctanoic acid
  REGION 2..8: note = cyclical region
  DISULFID 2..8: note = Cys-dCys bond
  MOD_RES 22: note = NH2
FCHYRWACTXXYGRRRRRQRRR

SEQ ID NO: 448 - protein, 22 aa, synthetic construct
  REGION 1..22: note = Description of sequence: MC4R agonist
  MOD_RES 1: note = d-Phenylalanine
  MOD_RES 4: note = D-ethyl-tyrosine
  MOD_RES 5: note = Homoarginine
  MOD_RES 7: note = Beta-alanine
  MOD_RES 8: note = d-Cysteine
  MOD_RES 10: note = Beta-alanine
  REGION 2..8: note = cyclical region
  DISULFID 2..8: note = Cys-dCys bond
  MOD_RES 22: note = NH2
FCHYRWACTAYGRRRRRQRRRR

SEQ ID NO: 449 - protein, 20 aa, synthetic construct
  REGION 1..20: note = Description of sequence: MC4R agonist
  MOD_RES 1: note = d-Phenylalanine
  MOD_RES 4: note = D-ethyl-tyrosine
  MOD_RES 5: note = Homoarginine
  MOD_RES 7: note = Beta-alanine
  MOD_RES 8: note = d-Cysteine
  MOD_RES 10: note = Beta-alanine
  REGION 2..8: note = cyclical region
  DISULFID 2..8: note = Cys-dCys bond
  MOD_RES 20: note = NH2
FCHYRWACTARRRRRQRRRR

SEQ ID NO: 450 - protein, 23 aa, synthetic construct
  REGION 1..23: note = Description of sequence: MC4R agonist
  MOD_RES 1: note = d-Phenylalanine
  MOD_RES 4: note = D-ethyl-tyrosine
  MOD_RES 5: note = Homoarginine
  MOD_RES 7: note = Beta-alanine
  MOD_RES 8: note = d-Cysteine
  MOD_RES 10: note = Beta-alanine
  MOD_RES 11: note = Beta-alanine
  REGION 2..8: note = cyclical region
  DISULFID 2..8: note = Cys-dCys bond
  MOD_RES 23: note = NH2
FCHYRWACTAAYGRRRRRQRRRR

SEQ ID NO: 451 - protein, 21 aa, synthetic construct
  REGION 1..21: note = Description of sequence: MC4R agonist
  MOD_RES 1: note = d-Phenylalanine
  MOD_RES 4: note = D-ethyl-tyrosine
  MOD_RES 5: note = Homoarginine
  MOD_RES 7: note = Beta-alanine
  MOD_RES 8: note = d-Cysteine
  MOD_RES 10: note = Beta-alanine
  MOD_RES 11: note = Beta-alanine
  REGION 2..8: note = cyclical region
  DISULFID 2..8: note = Cys-dCys bond
  MOD_RES 21: note = NH2
FCHYRWACTAARRRRRQRRRR

SEQ ID NO: 452 - protein, 22 aa, synthetic construct
  REGION 1..22: note = Description of sequence: MC4R agonist
  MOD_RES 1: note = d-Phenylalanine
  MOD_RES 4: note = D-ethyl-tyrosine
  MOD_RES 5: note = Homoarginine
  MOD_RES 7: note = Beta-alanine
  MOD_RES 8: note = d-Cysteine
  MOD_RES 10: note = 8-amino-3,6-dioxaoctanoic acid
  REGION 2..8: note = cyclical region
  DISULFID 2..8: note = Cys-dCys bond
  MOD_RES 22: note = NH2
FCHYRWACTXYGRRRRRQRRRR

SEQ ID NO: 453 - protein, 20 aa, synthetic construct
  REGION 1..20: note = Description of sequence: MC4R agonist
  MOD_RES 1: note = d-Phenylalanine
  MOD_RES 4: note = D-ethyl-tyrosine
  MOD_RES 5: note = Homoarginine
  MOD_RES 7: note = Beta-alanine
  MOD_RES 8: note = d-Cysteine
  MOD_RES 10: note = 8-amino-3,6-dioxaoctanoic acid
  REGION 2..8: note = cyclical region
  DISULFID 2..8: note = Cys-dCys bond
  MOD_RES 20: note = NH2
FCHYRWACTXRRRRRQRRRR

SEQ ID NO: 454 - protein, 23 aa, synthetic construct
  REGION 1..23: note = Description of sequence: MC4R agonist
  MOD_RES 1: note = d-Phenylalanine
  MOD_RES 4: note = D-ethyl-tyrosine
  MOD_RES 5: note = Homoarginine
  MOD_RES 7: note = Beta-alanine
  MOD_RES 8: note = d-Cysteine
  MOD_RES 10: note = 8-amino-3,6-dioxaoctanoic acid
  MOD_RES 11: note = 8-amino-3,6-dioxaoctanoic acid
  REGION 2..8: note = cyclical region
  DISULFID 2..8: note = Cys-dCys bond
  MOD_RES 23: note = NH2
FCHYRWACTXXYGRRRRRQRRRR

SEQ ID NO: 455 - protein, 21 aa, synthetic construct
  REGION 1..21: note = Description of sequence: MC4R agonist
  MOD_RES 1: note = d-Phenylalanine
  MOD_RES 4: note = D-ethyl-tyrosine
  MOD_RES 5: note = Homoarginine
  MOD_RES 7: note = Beta-alanine
  MOD_RES 8: note = d-Cysteine
  MOD_RES 10: note = 8-amino-3,6-dioxaoctanoic acid
  MOD_RES 11: note = 8-amino-3,6-dioxaoctanoic acid
  REGION 2..8: note = cyclical region
  DISULFID 2..8: note = Cys-dCys bond
  MOD_RES 21: note = NH2
FCHYRWACTXXRRRRRQRRRR

SEQ ID NO: 456 - protein, 21 aa, synthetic construct
  REGION 1..21: note = Description of sequence: MC4R agonist
  MOD_RES 1: note = d-Phenylalanine
  MOD_RES 4: note = D-ethyl-tyrosine
  MOD_RES 5: note = Homoarginine
  MOD_RES 6: note = biphenylalanine
  MOD_RES 7: note = Beta-alanine
  MOD_RES 8: note = d-Cysteine
  MOD_RES 10: note = Beta-alanine
  REGION 2..8: note = cyclical region
  DISULFID 2..8: note = Cys-dCys bond
  MOD_RES 21: note = NH2
FCHYRXACTAYGRRRRRQRRR

SEQ ID NO: 457 - protein, 22 aa, synthetic construct
  REGION 1..22: note = Description of sequence: MC4R agonist
  MOD_RES 1: note = d-Phenylalanine
  MOD_RES 4: note = D-ethyl-tyrosine
  MOD_RES 5: note = Homoarginine
  MOD_RES 6: note = biphenylalanine
  MOD_RES 7: note = Beta-alanine
  MOD_RES 8: note = d-Cysteine
  MOD_RES 10: note = Beta-alanine
  REGION 2..8: note = cyclical region
  DISULFID 2..8: note = Cys-dCys bond
  MOD_RES 22: note = NH2
FCHYRXACTAYGRRRRRQRRRR

SEQ ID NO: 458 - protein, 19 aa, synthetic construct
  REGION 1..19: note = Description of sequence: MC4R agonist
  MOD_RES 1: note = d-Phenylalanine
  MOD_RES 4: note = D-ethyl-tyrosine
  MOD_RES 5: note = Homoarginine
  MOD_RES 6: note = biphenylalanine
  MOD_RES 7: note = Beta-alanine
  MOD_RES 8: note = d-Cysteine
  MOD_RES 10: note = Beta-alanine
  REGION 2..8: note = cyclical region
  DISULFID 2..8: note = Cys-dCys bond
  MOD_RES 19: note = NH2
FCHYRXACTARRRRRQRRR

SEQ ID NO: 459 - protein, 22 aa, synthetic construct
  REGION 1..22: note = Description of sequence: MC4R agonist
  MOD_RES 1: note = d-Phenylalanine
  MOD_RES 4: note = D-ethyl-tyrosine
  MOD_RES 5: note = Homoarginine
  MOD_RES 6: note = biphenylalanine
  MOD_RES 7: note = Beta-alanine
  MOD_RES 8: note = d-Cysteine
  MOD_RES 10: note = Beta-alanine
  MOD_RES 11: note = Beta-alanine
  REGION 2..8: note = cyclical region
  DISULFID 2..8: note = Cys-dCys bond
  MOD_RES 22: note = NH2
FCHYRXACTAAYGRRRRRQRRR

SEQ ID NO: 460 - protein, 20 aa, synthetic construct
  REGION 1..20: note = Description of sequence: MC4R agonist
  MOD_RES 1: note = d-Phenylalanine
  MOD_RES 4: note = D-ethyl-tyrosine
  MOD_RES 5: note = Homoarginine
  MOD_RES 6: note = biphenylalanine
  MOD_RES 7: note = Beta-alanine
  MOD_RES 8: note = d-Cysteine
  MOD_RES 10: note = Beta-alanine
  MOD_RES 11: note = Beta-alanine
  REGION 2..8: note = cyclical region
  DISULFID 2..8: note = Cys-dCys bond
  MOD_RES 20: note = NH2
FCHYRXACTAARRRRRQRRR

SEQ ID NO: 461 - protein, 21 aa, synthetic construct
  REGION 1..21: note = Description of sequence: MC4R agonist
  MOD_RES 1: note = d-Phenylalanine
  MOD_RES 4: note = D-ethyl-tyrosine
  MOD_RES 5: note = Homoarginine
  MOD_RES 6: note = biphenylalanine
  MOD_RES 7: note = Beta-alanine
  MOD_RES 8: note = d-Cysteine
  MOD_RES 10: note = 8-amino-3,6-dioxaoctanoic acid
  REGION 2..8: note = cyclical region
  DISULFID 2..8: note = Cys-dCys bond
  MOD_RES 21: note = NH2
FCHYRXACTXYGRRRRRQRRR

SEQ ID NO: 462 - protein, 22 aa, synthetic construct
  REGION 1..22: note = Description of sequence: MC4R agonist
  MOD_RES 1: note = d-Phenylalanine
  MOD_RES 4: note = D-ethyl-tyrosine
  MOD_RES 5: note = Homoarginine
  MOD_RES 6: note = biphenylalanine
  MOD_RES 7: note = Beta-alanine
  MOD_RES 8: note = d-Cysteine
  MOD_RES 10: note = 8-amino-3,6-dioxaoctanoic acid
  REGION 2..8: note = cyclical region
  DISULFID 2..8: note = Cys-dCys bond
  MOD_RES 22: note = NH2
FCHYRXACTXYGRRRRRQRRRR

SEQ ID NO: 463 - protein, 19 aa, synthetic construct
  REGION 1..19: note = Description of sequence: MC4R agonist
  MOD_RES 1: note = d-Phenylalanine
  MOD_RES 4: note = D-ethyl-tyrosine
  MOD_RES 5: note = Homoarginine
  MOD_RES 6: note = biphenylalanine
  MOD_RES 7: note = Beta-alanine
  MOD_RES 8: note = d-Cysteine
  MOD_RES 10: note = 8-amino-3,6-dioxaoctanoic acid
  REGION 2..8: note = cyclical region
  DISULFID 2..8: note = Cys-dCys bond
  MOD_RES 19: note = NH2
FCHYRXACTXRRRRRQRRR

SEQ ID NO: 464 - protein, 22 aa, synthetic construct
  REGION 1..22: note = Description of sequence: MC4R agonist
  MOD_RES 1: note = d-Phenylalanine
  MOD_RES 4: note = D-ethyl-tyrosine
  MOD_RES 5: note = Homoarginine
  MOD_RES 6: note = biphenylalanine
  MOD_RES 7: note = Beta-alanine
  MOD_RES 8: note = d-Cysteine
  MOD_RES 10: note = 8-amino-3,6-dioxaoctanoic acid
  MOD_RES 11: note = 8-amino-3,6-dioxaoctanoic acid
  REGION 2..8: note = cyclical region
  DISULFID 2..8: note = Cys-dCys bond
  MOD_RES 22: note = NH2
FCHYRXACTXXYGRRRRRQRRR

SEQ ID NO: 465 - protein, 20 aa, synthetic construct
  REGION 1..20: note = Description of sequence: MC4R agonist
  MOD_RES 1: note = d-Phenylalanine
  MOD_RES 4: note = D-ethyl-tyrosine
  MOD_RES 5: note = Homoarginine
  MOD_RES 6: note = biphenylalanine
  MOD_RES 7: note = Beta-alanine
  MOD_RES 8: note = d-Cysteine
  MOD_RES 10: note = 8-amino-3,6-dioxaoctanoic acid
  MOD_RES 11: note = 8-amino-3,6-dioxaoctanoic acid
  REGION 2..8: note = cyclical region
  DISULFID 2..8: note = Cys-dCys bond
  MOD_RES 20: note = NH2
FCHYRXACTXXRRRRRQRRR

SEQ ID NO: 466 - protein, 21 aa, synthetic construct
  REGION 1..21: note = Description of sequence: MC4R agonist
  MOD_RES 1: note = Nle
  MOD_RES 3: note = d-Alanine
  MOD_RES 5: note = d-Phenylalanine
  MOD_RES 10: note = Beta-alanine
  REGION 2..9: note = cyclical region
  DISULFID 2..9: note = Cys-Cys bond
  MOD_RES <1: note = Acetylated
  MOD_RES 21: note = NH2
XCAHFRWGCAYGRRRRRQRRR

SEQ ID NO: 467 - protein, 19 aa, synthetic construct
  REGION 1..19: note = Description of sequence: MC4R agonist
  MOD_RES 1: note = Nle
  MOD_RES 3: note = d-Alanine
  MOD_RES 5: note = d-Phenylalanine
  MOD_RES 10: note = Beta-alanine
  REGION 2..9: note = cyclical region
  DISULFID 2..9: note = Cys-Cys bond
  MOD_RES <1: note = Acetylated
  MOD_RES 19: note = NH2
XCAHFRWGCARRRRRQRRR

SEQ ID NO: 468 - protein, 20 aa, synthetic construct
  REGION 1..20: note = Description of sequence: MC4R agonist
  MOD_RES 1: note = Nle
  MOD_RES 4: note = d-Phenylalanine
  MOD_RES 7: note = 5-aminopentanoic acid (HN-(CH2)4-C(O)
  MOD_RES 9: note = Beta-alanine
  REGION 2..8: note = cyclical region
  DISULFID 2..8: note = Cys-Cys bond
  MOD_RES 20: note = NH2
XCHFRWXCAYGRRRRRQRRR

SEQ ID NO: 469 - protein, 18 aa, synthetic construct
  REGION 1..18: note = Description of sequence: MC4R agonist
  MOD_RES 1: note = Nle
  MOD_RES 4: note = d-Phenylalanine
  MOD_RES 7: note = 5-aminopentanoic acid (HN-(CH2)4-C(O)
  MOD_RES 9: note = Beta-alanine
  REGION 2..8: note = cyclical region
  DISULFID 2..8: note = Cys-Cys bond
  MOD_RES 18: note = NH2
XCHFRWXCARRRRRQRRR

SEQ ID NO: 470 - protein, 21 aa, synthetic construct
  REGION 1..21: note = Description of sequence: MC4R agonist
  MOD_RES 1: note = Nle
  MOD_RES 4: note = d-Phenylalanine
  MOD_RES 7: note = 5-aminopentanoic acid (HN-(CH2)4-C(O)
  MOD_RES 9: note = Beta-alanine
  MOD_RES 10: note = Beta-alanine
  REGION 2..8: note = cyclical region
  DISULFID 2..8: note = Cys-Cys bond
  MOD_RES 21: note = NH2
XCHFRWXCAAYGRRRRRQRRR

SEQ ID NO: 471 - protein, 19 aa, synthetic construct
  REGION 1..19: note = Description of sequence: MC4R agonist
  MOD_RES 1: note = Nle
  MOD_RES 4: note = d-Phenylalanine
  MOD_RES 7: note = 5-aminopentanoic acid (HN-(CH2)4-C(O)
  MOD_RES 9: note = Beta-alanine
  MOD_RES 10: note = Beta-alanine
  REGION 2..8: note = cyclical region
  DISULFID 2..8: note = Cys-Cys bond
  MOD_RES 19: note = NH2
XCHFRWXCAARRRRRQRRR

SEQ ID NO: 472 - protein, 21 aa, synthetic construct
  REGION 1..21: note = Description of sequence: MC4R agonist
  MOD_RES 1: note = Nle
  MOD_RES 4: note = d-Phenylalanine
  MOD_RES 7: note = 5-aminopentanoic acid (HN-(CH2)4-C(O)
  MOD_RES 9: note = Beta-alanine
  REGION 2..8: note = cyclical region
  DISULFID 2..8: note = Cys-Cys bond
  MOD_RES 21: note = NH2
XCHFRWXCAYGRRRRRQRRRR

SEQ ID NO: 473 - protein, 19 aa, synthetic construct
  REGION 1..19: note = Description of sequence: MC4R agonist
  MOD_RES 1: note = Nle
  MOD_RES 4: note = d-Phenylalanine
  MOD_RES 7: note = 5-aminopentanoic acid (HN-(CH2)4-C(O)
  MOD_RES 9: note = Beta-alanine
  REGION 2..8: note = cyclical region
  DISULFID 2..8: note = Cys-Cys bond
  MOD_RES 19: note = NH2
XCHFRWXCARRRRRQRRRR

SEQ ID NO: 474 - protein, 22 aa, synthetic construct
  REGION 1..22: note = Description of sequence: MC4R agonist
  MOD_RES 1: note = Nle
  MOD_RES 4: note = d-Phenylalanine
  MOD_RES 7: note = 5-aminopentanoic acid (HN-(CH2)4-C(O)
  MOD_RES 9: note = Beta-alanine
  MOD_RES 10: note = Beta-alanine
  REGION 2..8: note = cyclical region
  DISULFID 2..8: note = Cys-Cys bond
  MOD_RES 22: note = NH2
XCHFRWXCAAYGRRRRRQRRRR

SEQ ID NO: 475 - protein, 20 aa, synthetic construct
  REGION 1..20: note = Description of sequence: MC4R agonist
  MOD_RES 1: note = Nle
  MOD_RES 4: note = d-Phenylalanine
  MOD_RES 7: note = 5-aminopentanoic acid (HN-(CH2)4-C(O)
  MOD_RES 9: note = Beta-alanine
  MOD_RES 10: note = Beta-alanine
  REGION 2..8: note = cyclical region
  DISULFID 2..8: note = Cys-Cys bond
  MOD_RES 20: note = NH2
XCHFRWXCAARRRRRQRRRR

SEQ ID NO: 476 - protein, 20 aa, synthetic construct
  REGION 1..20: note = Description of sequence: MC4R agonist
  MOD_RES 1: note = Nle
  MOD_RES 4: note = d-Phenylalanine
  MOD_RES 7: note = 5-aminopentanoic acid (HN-(CH2)4-C(O)
  MOD_RES 9: note = 8-amino-3,6-dioxaoctanoic acid
  REGION 2..8: note = cyclical region
  DISULFID 2..8: note = Cys-Cys bond
  MOD_RES 20: note = NH2
XCHFRWXCXYGRRRRRQRRR

SEQ ID NO: 477 - protein, 18 aa, synthetic construct
  REGION 1..18: note = Description of sequence: MC4R agonist
  MOD_RES 1: note = Nle
  MOD_RES 4: note = d-Phenylalanine
  MOD_RES 7: note = 5-aminopentanoic acid (HN-(CH2)4-C(O)
  MOD_RES 9: note = 8-amino-3,6-dioxaoctanoic acid
  REGION 2..8: note = cyclical region
  DISULFID 2..8: note = Cys-Cys bond
  MOD_RES 18: note = NH2
XCHFRWXCXRRRRRQRRR

SEQ ID NO: 478 - protein, 21 aa, synthetic construct
  REGION 1..21: note = Description of sequence: MC4R agonist
  MOD_RES 1: note = Nle
  MOD_RES 4: note = d-Phenylalanine
  MOD_RES 7: note = 5-aminopentanoic acid (HN-(CH2)4-C(O)
  MOD_RES 9: note = 8-amino-3,6-dioxaoctanoic acid
  MOD_RES 10: note = 8-amino-3,6-dioxaoctanoic acid
  REGION 2..8: note = cyclical region
  DISULFID 2..8: note = Cys-Cys bond
  MOD_RES 21: note = NH2
XCHFRWXCXXYGRRRRRQRRR

SEQ ID NO: 479 - protein, 19 aa, synthetic construct
  REGION 1..19: note = Description of sequence: MC4R agonist
  MOD_RES 1: note = Nle
  MOD_RES 4: note = d-Phenylalanine
  MOD_RES 7: note = 5-aminopentanoic acid (HN-(CH2)4-C(O)
  MOD_RES 9: note = 8-amino-3,6-dioxaoctanoic acid
  MOD_RES 10: note = 8-amino-3,6-dioxaoctanoic acid
  REGION 2..8: note = cyclical region
  DISULFID 2..8: note = Cys-Cys bond
  MOD_RES 19: note = NH2
XCHFRWXCXXRRRRRQRRR

SEQ ID NO: 480 - protein, 21 aa, synthetic construct
  REGION 1..21: note = Description of sequence: MC4R agonist
  MOD_RES 1: note = Nle
  MOD_RES 4: note = d-Phenylalanine
  MOD_RES 7: note = 5-aminopentanoic acid (HN-(CH2)4-C(O)
  MOD_RES 9: note = 8-amino-3,6-dioxaoctanoic acid
  REGION 2..8: note = cyclical region
  DISULFID 2..8: note = Cys-Cys bond
  MOD_RES 21: note = NH2
XCHFRWXCXYGRRRRRQRRRR

SEQ ID NO: 481 - protein, 19 aa, synthetic construct
  REGION 1..19: note = Description of sequence: MC4R agonist
  MOD_RES 1: note = Nle
  MOD_RES 4: note = d-Phenylalanine
  MOD_RES 7: note = 5-aminopentanoic acid (HN-(CH2)4-C(O)
  MOD_RES 9: note = 8-amino-3,6-dioxaoctanoic acid
  REGION 2..8: note = cyclical region
  DISULFID 2..8: note = Cys-Cys bond
  MOD_RES 19: note = NH2
XCHFRWXCXRRRRRQRRRR

SEQ ID NO: 482 - protein, 22 aa, synthetic construct
  REGION 1..22: note = Description of sequence: MC4R agonist
  MOD_RES 1: note = Nle
  MOD_RES 4: note = d-Phenylalanine
  MOD_RES 7: note = 5-aminopentanoic acid (HN-(CH2)4-C(O)
  MOD_RES 9: note = 8-amino-3,6-dioxaoctanoic acid
  MOD_RES 10: note = 8-amino-3,6-dioxaoctanoic acid
  REGION 2..8: note = cyclical region
  DISULFID 2..8: note = Cys-Cys bond
  MOD_RES 22: note = NH2
XCHFRWXCXXYGRRRRRQRRRR

SEQ ID NO: 483 - protein, 20 aa, synthetic construct
  REGION 1..20: note = Description of sequence: MC4R agonist
  MOD_RES 1: note = Nle
  MOD_RES 4: note = d-Phenylalanine
  MOD_RES 7: note = 5-aminopentanoic acid (HN-(CH2)4-C(O)
  MOD_RES 9: note = 8-amino-3,6-dioxaoctanoic acid
  MOD_RES 10: note = 8-amino-3,6-dioxaoctanoic acid
  REGION 2..8: note = cyclical region
  DISULFID 2..8: note = Cys-Cys bond
  MOD_RES 20: note = NH2
XCHFRWXCXXRRRRRQRRRR

SEQ ID NO: 484 - protein, 20 aa, synthetic construct
  REGION 1..20: note = Description of sequence: MC4R agonist
  MOD_RES 1: note = Nle
  MOD_RES 3: note = d-Leucine
  MOD_RES 5: note = d-Phenylalanine
  MOD_RES 9: note = Beta-alanine
  REGION 2..8: note = cyclical region
  DISULFID 2..8: note = Cys-Cys bond
  MOD_RES <1: note = Acetylated
  MOD_RES 20: note = NH2
XCLHFRWCAYGRRRRRQRRR

SEQ ID NO: 485 - protein, 18 aa, synthetic construct
  REGION 1..18: note = Description of sequence: MC4R agonist
  MOD_RES 1: note = Nle
  MOD_RES 3: note = d-Leucine
  MOD_RES 5: note = d-Phenylalanine
  MOD_RES 9: note = Beta-alanine
  REGION 2..8: note = cyclical region
  DISULFID 2..8: note = Cys-Cys bond
  MOD_RES <1: note = Acetylated
  MOD_RES 18: note = NH2
XCLHFRWCARRRRRQRRR

SEQ ID NO: 486 - protein, 21 aa, synthetic construct
  REGION 1..21: note = Description of sequence: MC4R agonist
  MOD_RES 1: note = Nle
  MOD_RES 3: note = d-Leucine
  MOD_RES 5: note = d-Phenylalanine
  MOD_RES 9: note = Beta-alanine
  MOD_RES 10: note = Beta-alanine
  REGION 2..8: note = cyclical region
  DISULFID 2..8: note = Cys-Cys bond
  MOD_RES <1: note = Acetylated
  MOD_RES 21: note = NH2
XCLHFRWCAAYGRRRRRQRRR

SEQ ID NO: 487 - protein, 19 aa, synthetic construct
  REGION 1..19: note = Description of sequence: MC4R agonist
  MOD_RES 1: note = Nle
  MOD_RES 3: note = d-Leucine
  MOD_RES 5: note = d-Phenylalanine
  MOD_RES 9: note = Beta-alanine
  MOD_RES 10: note = Beta-alanine
  REGION 2..8: note = cyclical region
  DISULFID 2..8: note = Cys-Cys bond
  MOD_RES <1: note = Acetylated
  MOD_RES 19: note = NH2
XCLHFRWCAARRRRRQRRR

SEQ ID NO: 488 - protein, 20 aa, synthetic construct
  REGION 1..20: note = Description of sequence: MC4R agonist
  MOD_RES 1: note = Nle
  MOD_RES 3: note = d-Leucine
  MOD_RES 5: note = d-Phenylalanine
  MOD_RES 9: note = 8-amino-3,6-dioxaoctanoic acid
  REGION 2..8: note = cyclical region
  DISULFID 2..8: note = Cys-Cys bond
  MOD_RES <1: note = Acetylated
  MOD_RES 20: note = NH2
XCLHFRWCXYGRRRRRQRRR

SEQ ID NO: 489 - protein, 18 aa, synthetic construct
  REGION 1..18: note = Description of sequence: MC4R agonist
  MOD_RES 1: note = Nle
  MOD_RES 3: note = d-Leucine
  MOD_RES 5: note = d-Phenylalanine
  MOD_RES 9: note = 8-amino-3,6-dioxaoctanoic acid
  REGION 2..8: note = cyclical region
  DISULFID 2..8: note = Cys-Cys bond
  MOD_RES <1: note = Acetylated
  MOD_RES 18: note = NH2
XCLHFRWCXRRRRRQRRR

SEQ ID NO: 490 - protein, 21 aa, synthetic construct
  REGION 1..21: note = Description of sequence: MC4R agonist
  MOD_RES 1: note = Nle
  MOD_RES 3: note = d-Leucine
  MOD_RES 5: note = d-Phenylalanine
  MOD_RES 9: note = 8-amino-3,6-dioxaoctanoic acid
  MOD_RES 10: note = 8-amino-3,6-dioxaoctanoic acid
  REGION 2..8: note = cyclical region
  DISULFID 2..8: note = Cys-Cys bond
  MOD_RES <1: note = Acetylated
  MOD_RES 21: note = NH2
XCLHFRWCXXYGRRRRRQRRR

SEQ ID NO: 491 - protein, 19 aa, synthetic construct
  REGION 1..19: note = Description of sequence: MC4R agonist
  MOD_RES 1: note = Nle
  MOD_RES 3: note = d-Leucine
  MOD_RES 5: note = d-Phenylalanine
  MOD_RES 9: note = 8-amino-3,6-dioxaoctanoic acid
  MOD_RES 10: note = 8-amino-3,6-dioxaoctanoic acid
  REGION 2..8: note = cyclical region
  DISULFID 2..8: note = Cys-Cys bond
  MOD_RES <1: note = Acetylated
  MOD_RES 19: note = NH2
XCLHFRWCXXRRRRRQRRR

SEQ ID NO: 492 - protein, 21 aa, synthetic construct
  REGION 1..21: note = Description of sequence: MC4R agonist
  MOD_RES 1: note = Nle
  MOD_RES 3: note = d-Leucine
  MOD_RES 5: note = d-Phenylalanine
  MOD_RES 9: note = Beta-alanine
  REGION 2..8: note = cyclical region
  DISULFID 2..8: note = Cys-Cys bond
  MOD_RES <1: note = Acetylated
  MOD_RES 21: note = NH2
XCLHFRWCAYGRRRRRQRRRR

SEQ ID NO: 493 - protein, 19 aa, synthetic construct
  REGION 1..19: note = Description of sequence: MC4R agonist
  MOD_RES 1: note = Nle
  MOD_RES 3: note = d-Leucine
  MOD_RES 5: note = d-Phenylalanine
  MOD_RES 9: note = Beta-alanine
  REGION 2..8: note = cyclical region
  DISULFID 2..8: note = Cys-Cys bond
  MOD_RES <1: note = Acetylated
  MOD_RES 19: note = NH2
XCLHFRWCARRRRRQRRRR

SEQ ID NO: 494 - protein, 22 aa, synthetic construct
  REGION 1..22: note = Description of sequence: MC4R agonist
  MOD_RES 1: note = Nle
  MOD_RES 3: note = d-Leucine
  MOD_RES 5: note = d-Phenylalanine
  MOD_RES 9: note = Beta-alanine
  MOD_RES 10: note = Beta-alanine
  REGION 2..8: note = cyclical region
  DISULFID 2..8: note = Cys-Cys bond
  MOD_RES <1: note = Acetylated
  MOD_RES 22: note = NH2
XCLHFRWCAAYGRRRRRQRRRR

SEQ ID NO: 495 - protein, 20 aa, synthetic construct
  REGION 1..20: note = Description of sequence: MC4R agonist
  MOD_RES 1: note = Nle
  MOD_RES 3: note = d-Leucine
  MOD_RES 5: note = d-Phenylalanine
  MOD_RES 9: note = Beta-alanine
  MOD_RES 10: note = Beta-alanine
  REGION 2..8: note = cyclical region
  DISULFID 2..8: note = Cys-Cys bond
  MOD_RES <1: note = Acetylated
  MOD_RES 20: note = NH2
XCLHFRWCAARRRRRQRRRR

SEQ ID NO: 496 - protein, 21 aa, synthetic construct
  REGION 1..21: note = Description of sequence: MC4R agonist
  MOD_RES 1: note = Nle
  MOD_RES 3: note = d-Leucine
  MOD_RES 5: note = d-Phenylalanine
  MOD_RES 9: note = 8-amino-3,6-dioxaoctanoic acid
  REGION 2..8: note = cyclical region
  DISULFID 2..8: note = Cys-Cys bond
  MOD_RES <1: note = Acetylated
  MOD_RES 21: note = NH2
XCLHFRWCXYGRRRRRQRRRR

SEQ ID NO: 497 - protein, 19 aa, synthetic construct
  REGION 1..19: note = Description of sequence: MC4R agonist
  MOD_RES 1: note = Nle
  MOD_RES 3: note = d-Leucine
  MOD_RES 5: note = d-Phenylalanine
  MOD_RES 9: note = 8-amino-3,6-dioxaoctanoic acid
  REGION 2..8: note = cyclical region
  DISULFID 2..8: note = Cys-Cys bond
  MOD_RES <1: note = Acetylated
  MOD_RES 19: note = NH2
XCLHFRWCXRRRRRQRRRR

SEQ ID NO: 498 - protein, 22 aa, synthetic construct
  REGION 1..22: note = Description of sequence: MC4R agonist
  MOD_RES 1: note = Nle
  MOD_RES 3: note = d-Leucine
  MOD_RES 5: note = d-Phenylalanine
  MOD_RES 9: note = 8-amino-3,6-dioxaoctanoic acid
  MOD_RES 10: note = 8-amino-3,6-dioxaoctanoic acid
  REGION 2..8: note = cyclical region
  DISULFID 2..8: note = Cys-Cys bond
  MOD_RES <1: note = Acetylated
  MOD_RES 22: note = NH2
XCLHFRWCXXYGRRRRRQRRRR

SEQ ID NO: 499 - protein, 20 aa, synthetic construct
  REGION 1..20: note = Description of sequence: MC4R agonist
  MOD_RES 1: note = Nle
  MOD_RES 3: note = d-Leucine
  MOD_RES 5: note = d-Phenylalanine
  MOD_RES 9: note = 8-amino-3,6-dioxaoctanoic acid
  MOD_RES 10: note = 8-amino-3,6-dioxaoctanoic acid
  REGION 2..8: note = cyclical region
  DISULFID 2..8: note = Cys-Cys bond
  MOD_RES <1: note = Acetylated
  MOD_RES 20: note = NH2
XCLHFRWCXXRRRRRQRRRR

SEQ ID NO: 500 - protein, 20 aa, synthetic construct
  REGION 1..20: note = Description of sequence: MC4R agonist
  MOD_RES 1: note = Nle
  MOD_RES 3: note = d-beta-cyclohexylalanine
  MOD_RES 5: note = d-Phenylalanine
  MOD_RES 9: note = Beta-alanine
  REGION 2..8: note = cyclical region
  DISULFID 2..8: note = Cys-Cys bond
  MOD_RES <1: note = Acetylated
  MOD_RES 20: note = NH2
XCXHFRWCAYGRRRRRQRRR

SEQ ID NO: 501 - protein, 18 aa, synthetic construct
  REGION 1..18: note = Description of sequence: MC4R agonist
  MOD_RES 1: note = Nle
  MOD_RES 3: note = d-beta-cyclohexylalanine
  MOD_RES 5: note = d-Phenylalanine
  MOD_RES 9: note = Beta-alanine
  REGION 2..8: note = cyclical region
  DISULFID 2..8: note = Cys-Cys bond
  MOD_RES <1: note = Acetylated
  MOD_RES 18: note = NH2
XCXHFRWCARRRRRQRRR

SEQ ID NO: 502 - protein, 21 aa, synthetic construct
  REGION 1..21: note = Description of sequence: MC4R agonist
  MOD_RES 1: note = Nle
  MOD_RES 3: note = d-beta-cyclohexylalanine
  MOD_RES 5: note = d-Phenylalanine
  MOD_RES 9: note = Beta-alanine
  MOD_RES 10: note = Beta-alanine
  REGION 2..8: note = cyclical region
  DISULFID 2..8: note = Cys-Cys bond
  MOD_RES <1: note = Acetylated
  MOD_RES 21: note = NH2
XCXHFRWCAAYGRRRRRQRRR

SEQ ID NO: 503 - protein, 19 aa, synthetic construct
  REGION 1..19: note = Description of sequence: MC4R agonist
  MOD_RES 1: note = Nle
  MOD_RES 3: note = d-beta-cyclohexylalanine
  MOD_RES 5: note = d-Phenylalanine
  MOD_RES 9: note = Beta-alanine
  MOD_RES 10: note = Beta-alanine
  REGION 2..8: note = cyclical region
  DISULFID 2..8: note = Cys-Cys bond
  MOD_RES <1: note = Acetylated
  MOD_RES 19: note = NH2
XCXHFRWCAARRRRRQRRR

SEQ ID NO: 504 - protein, 20 aa, synthetic construct
  REGION 1..20: note = Description of sequence: MC4R agonist
  MOD_RES 1: note = Nle
  MOD_RES 3: note = d-beta-cyclohexylalanine
  MOD_RES 5: note = d-Phenylalanine
  MOD_RES 9: note = 8-amino-3,6-dioxaoctanoic acid
  REGION 2..8: note = cyclical region
  DISULFID 2..8: note = Cys-Cys bond
  MOD_RES <1: note = Acetylated
  MOD_RES 20: note = NH2
XCXHFRWCXYGRRRRRQRRR

SEQ ID NO: 505 - protein, 18 aa, synthetic construct
  REGION 1..18: note = Description of sequence: MC4R agonist
  MOD_RES 1: note = Nle
  MOD_RES 3: note = d-beta-cyclohexylalanine
  MOD_RES 5: note = d-Phenylalanine
  MOD_RES 9: note = 8-amino-3,6-dioxaoctanoic acid
  REGION 2..8: note = cyclical region
  DISULFID 2..8: note = Cys-Cys bond
  MOD_RES <1: note = Acetylated
  MOD_RES 18: note = NH2
XCXHFRWCXRRRRRQRRR

SEQ ID NO: 506 - protein, 21 aa, synthetic construct
  REGION 1..21: note = Description of sequence: MC4R agonist
  MOD_RES 1: note = Nle
  MOD_RES 3: note = d-beta-cyclohexylalanine
  MOD_RES 5: note = d-Phenylalanine
  MOD_RES 9: note = 8-amino-3,6-dioxaoctanoic acid
  MOD_RES 10: note = 8-amino-3,6-dioxaoctanoic acid
  REGION 2..8: note = cyclical region
  DISULFID 2..8: note = Cys-Cys bond
  MOD_RES <1: note = Acetylated
  MOD_RES 21: note = NH2
XCXHFRWCXXYGRRRRRQRRR

SEQ ID NO: 507 - protein, 19 aa, synthetic construct
  REGION 1..19: note = Description of sequence: MC4R agonist
  MOD_RES 1: note = Nle
  MOD_RES 3: note = d-beta-cyclohexylalanine
  MOD_RES 5: note = d-Phenylalanine
  MOD_RES 9: note = 8-amino-3,6-dioxaoctanoic acid
  MOD_RES 10: note = 8-amino-3,6-dioxaoctanoic acid
  REGION 2..8: note = cyclical region
  DISULFID 2..8: note = Cys-Cys bond
  MOD_RES <1: note = Acetylated
  MOD_RES 19: note = NH2
XCXHFRWCXXRRRRRQRRR

SEQ ID NO: 508 - protein, 21 aa, synthetic construct
  REGION 1..21: note = Description of sequence: MC4R agonist
  MOD_RES 1: note = Nle
  MOD_RES 3: note = d-beta-cyclohexylalanine
  MOD_RES 5: note = d-Phenylalanine
  MOD_RES 9: note = Beta-alanine
  REGION 2..8: note = cyclical region
  DISULFID 2..8: note = Cys-Cys bond
  MOD_RES <1: note = Acetylated
  MOD_RES 21: note = NH2
XCXHFRWCAYGRRRRRQRRRR

SEQ ID NO: 509 - protein, 19 aa, synthetic construct
  REGION 1..19: note = Description of sequence: MC4R agonist
  MOD_RES 1: note = Nle
  MOD_RES 3: note = d-beta-cyclohexylalanine
  MOD_RES 5: note = d-Phenylalanine
  MOD_RES 9: note = Beta-alanine
  REGION 2..8: note = cyclical region
  DISULFID 2..8: note = Cys-Cys bond
  MOD_RES <1: note = Acetylated
  MOD_RES 19: note = NH2
XCXHFRWCARRRRRQRRRR

SEQ ID NO: 510 - protein, 22 aa, synthetic construct
  REGION 1..22: note = Description of sequence: MC4R agonist
  MOD_RES 1: note = Nle
  MOD_RES 3: note = d-beta-cyclohexylalanine
  MOD_RES 5: note = d-Phenylalanine
  MOD_RES 9: note = Beta-alanine
  MOD_RES 10: note = Beta-alanine
  REGION 2..8: note = cyclical region
  DISULFID 2..8: note = Cys-Cys bond
  MOD_RES <1: note = Acetylated
  MOD_RES 22: note = NH2
XCXHFRWCAAYGRRRRRQRRRR

SEQ ID NO: 511 - protein, 20 aa, synthetic construct
  REGION 1..20: note = Description of sequence: MC4R agonist
  MOD_RES 1: note = Nle
  MOD_RES 3: note = d-beta-cyclohexylalanine
  MOD_RES 5: note = d-Phenylalanine
  MOD_RES 9: note = Beta-alanine
  MOD_RES 10: note = Beta-alanine
  REGION 2..8: note = cyclical region
  DISULFID 2..8: note = Cys-Cys bond
  MOD_RES <1: note = Acetylated
  MOD_RES 20: note = NH2
XCXHFRWCAARRRRRQRRRR

SEQ ID NO: 512 - protein, 21 aa, synthetic construct
  REGION 1..21: note = Description of sequence: MC4R agonist
  MOD_RES 1: note = Nle
  MOD_RES 3: note = d-beta-cyclohexylalanine
  MOD_RES 5: note = d-Phenylalanine
  MOD_RES 9: note = 8-amino-3,6-dioxaoctanoic acid
  REGION 2..8: note = cyclical region
  DISULFID 2..8: note = Cys-Cys bond
  MOD_RES <1: note = Acetylated
  MOD_RES 21: note = NH2
XCXHFRWCXYGRRRRRQRRRR

SEQ ID NO: 513 - protein, 19 aa, synthetic construct
  REGION 1..19: note = Description of sequence: MC4R agonist
  MOD_RES 1: note = Nle
  MOD_RES 3: note = d-beta-cyclohexylalanine
  MOD_RES 5: note = d-Phenylalanine
  MOD_RES 9: note = 8-amino-3,6-dioxaoctanoic acid
  REGION 2..8: note = cyclical region
  DISULFID 2..8: note = Cys-Cys bond
  MOD_RES <1: note = Acetylated
  MOD_RES 19: note = NH2
XCXHFRWCXRRRRRQRRRR

SEQ ID NO: 514 - protein, 22 aa, synthetic construct
  REGION 1..22: note = Description of sequence: MC4R agonist
  MOD_RES 1: note = Nle
  MOD_RES 3: note = d-beta-cyclohexylalanine
  MOD_RES 5: note = d-Phenylalanine
  MOD_RES 9: note = 8-amino-3,6-dioxaoctanoic acid
  MOD_RES 10: note = 8-amino-3,6-dioxaoctanoic acid
  REGION 2..8: note = cyclical region
  DISULFID 2..8: note = Cys-Cys bond
  MOD_RES <1: note = Acetylated
  MOD_RES 22: note = NH2
XCXHFRWCXXYGRRRRRQRRRR

SEQ ID NO: 515 - protein, 20 aa, synthetic construct
  REGION 1..20: note = Description of sequence: MC4R agonist
  MOD_RES 1: note = Nle
  MOD_RES 3: note = d-beta-cyclohexylalanine
  MOD_RES 5: note = d-Phenylalanine
  MOD_RES 9: note = 8-amino-3,6-dioxaoctanoic acid
  MOD_RES 10: note = 8-amino-3,6-dioxaoctanoic acid
  REGION 2..8: note = cyclical region
  DISULFID 2..8: note = Cys-Cys bond
  MOD_RES <1: note = Acetylated
  MOD_RES 20: note = NH2
XCXHFRWCXXRRRRRQRRRR

SEQ ID NO: 516 - protein, 20 aa, synthetic construct
  REGION 1..20: note = Description of sequence: MC4R agonist
  MOD_RES 1: note = Nle
  MOD_RES 4: note = d-Phenylalanine
  MOD_RES 7: note = 4Abu
  MOD_RES 9: note = Beta-alanine
  REGION 2..8: note = cyclical region
  DISULFID 2..8: note = Cys-Cys bond
  MOD_RES 20: note = NH2
XCHFRWXCAYGRRRRRQRRR

SEQ ID NO: 517 - protein, 18 aa, synthetic construct
  REGION 1..18: note = Description of sequence: MC4R agonist
  MOD_RES 1: note = Nle
  MOD_RES 4: note = d-Phenylalanine
  MOD_RES 7: note = 4Abu
  MOD_RES 9: note = Beta-alanine
  REGION 2..8: note = cyclical region
  DISULFID 2..8: note = Cys-Cys bond
  MOD_RES 18: note = NH2
XCHFRWXCARRRRRQRRR

SEQ ID NO: 518 - protein, 21 aa, synthetic construct
  REGION 1..21: note = Description of sequence: MC4R agonist
  MOD_RES 1: note = Nle
  MOD_RES 4: note = d-Phenylalanine
  MOD_RES 7: note = 4Abu
  MOD_RES 9: note = Beta-alanine
  MOD_RES 10: note = Beta-alanine
  REGION 2..8: note = cyclical region
  DISULFID 2..8: note = Cys-Cys bond
  MOD_RES 21: note = NH2
XCHFRWXCAAYGRRRRRQRRR

SEQ ID NO: 519 - protein, 19 aa, synthetic construct
  REGION 1..19: note = Description of sequence: MC4R agonist
  MOD_RES 1: note = Nle
  MOD_RES 4: note = d-Phenylalanine
  MOD_RES 7: note = 4Abu
  MOD_RES 9: note = Beta-alanine
  MOD_RES 10: note = Beta-alanine
  REGION 2..8: note = cyclical region
  DISULFID 2..8: note = Cys-Cys bond
  MOD_RES 19: note = NH2
XCHFRWXCAARRRRRQRRR

SEQ ID NO: 520 - protein, 21 aa, synthetic construct
  REGION 1..21: note = Description of sequence: MC4R agonist
  MOD_RES 1: note = Nle
  MOD_RES 4: note = d-Phenylalanine
  MOD_RES 7: note = 4Abu
  MOD_RES 9: note = Beta-alanine
  REGION 2..8: note = cyclical region
  DISULFID 2..8: note = Cys-Cys bond
  MOD_RES 21: note = NH2
XCHFRWXCAYGRRRRRQRRRR

SEQ ID NO: 521 - protein, 19 aa, synthetic construct
  REGION 1..19: note = Description of sequence: MC4R agonist
  MOD_RES 1: note = Nle
  MOD_RES 4: note = d-Phenylalanine
  MOD_RES 7: note = 4Abu
  MOD_RES 9: note = Beta-alanine
  REGION 2..8: note = cyclical region
  DISULFID 2..8: note = Cys-Cys bond
  MOD_RES 19: note = NH2
XCHFRWXCARRRRRQRRRR

SEQ ID NO: 522 - protein, 22 aa, synthetic construct
  REGION 1..22: note = Description of sequence: MC4R agonist
  MOD_RES 1: note = Nle
  MOD_RES 4: note = d-Phenylalanine
  MOD_RES 7: note = 4Abu
  MOD_RES 9: note = Beta-alanine
  MOD_RES 10: note = Beta-alanine
  REGION 2..8: note = cyclical region
  DISULFID 2..8: note = Cys-Cys bond
  MOD_RES 22: note = NH2
XCHFRWXCAAYGRRRRRQRRRR

SEQ ID NO: 523 - protein, 20 aa, synthetic construct
  REGION 1..20: note = Description of sequence: MC4R agonist
  MOD_RES 1: note = Nle
  MOD_RES 4: note = d-Phenylalanine
  MOD_RES 7: note = 4Abu
  MOD_RES 9: note = Beta-alanine
  MOD_RES 10: note = Beta-alanine
  REGION 2..8: note = cyclical region
  DISULFID 2..8: note = Cys-Cys bond
  MOD_RES 20: note = NH2
XCHFRWXCAARRRRRQRRRR

SEQ ID NO: 524 - protein, 20 aa, synthetic construct
  REGION 1..20: note = Description of sequence: MC4R agonist
  MOD_RES 1: note = Nle
  MOD_RES 4: note = d-Phenylalanine
  MOD_RES 7: note = 4Abu
  MOD_RES 9: note = 8-amino-3,6-dioxaoctanoic acid
  REGION 2..8: note = cyclical region
  DISULFID 2..8: note = Cys-Cys bond
  MOD_RES 20: note = NH2
XCHFRWXCXYGRRRRRQRRR

SEQ ID NO: 525 - protein, 18 aa, synthetic construct
  REGION 1..18: note = Description of sequence: MC4R agonist
  MOD_RES 1: note = Nle
  MOD_RES 4: note = d-Phenylalanine
  MOD_RES 7: note = 4Abu
  MOD_RES 9: note = 8-amino-3,6-dioxaoctanoic acid
  REGION 2..8: note = cyclical region
  DISULFID 2..8: note = Cys-Cys bond
  MOD_RES 18: note = NH2
XCHFRWXCXRRRRRQRRR

SEQ ID NO: 526 - protein, 21 aa, synthetic construct
  REGION 1..21: note = Description of sequence: MC4R agonist
  MOD_RES 1: note = Nle
  MOD_RES 4: note = d-Phenylalanine
  MOD_RES 7: note = 4Abu
  MOD_RES 9: note = 8-amino-3,6-dioxaoctanoic acid
  MOD_RES 10: note = 8-amino-3,6-dioxaoctanoic acid
  REGION 2..8: note = cyclical region
  DISULFID 2..8: note = Cys-Cys bond
  MOD_RES 21: note = NH2
XCHFRWXCXXYGRRRRRQRRR

SEQ ID NO: 527 - protein, 19 aa, synthetic construct
  REGION 1..19: note = Description of sequence: MC4R agonist
  MOD_RES 1: note = Nle
  MOD_RES 4: note = d-Phenylalanine
  MOD_RES 7: note = 4Abu
  MOD_RES 9: note = 8-amino-3,6-dioxaoctanoic acid
  MOD_RES 10: note = 8-amino-3,6-dioxaoctanoic acid
  REGION 2..8: note = cyclical region
  DISULFID 2..8: note = Cys-Cys bond
  MOD_RES 19: note = NH2
XCHFRWXCXXRRRRRQRRR

SEQ ID NO: 528 - protein, 21 aa, synthetic construct
  REGION 1..21: note = Description of sequence: MC4R agonist
  MOD_RES 1: note = Nle
  MOD_RES 4: note = d-Phenylalanine
  MOD_RES 7: note = 4Abu
  MOD_RES 9: note = 8-amino-3,6-dioxaoctanoic acid
  REGION 2..8: note = cyclical region
  DISULFID 2..8: note = Cys-Cys bond
  MOD_RES 21: note = NH2
XCHFRWXCXYGRRRRRQRRRR

SEQ ID NO: 529 - protein, 19 aa, synthetic construct
  REGION 1..19: note = Description of sequence: MC4R agonist
  MOD_RES 1: note = Nle
  MOD_RES 4: note = d-Phenylalanine
  MOD_RES 7: note = 4Abu
  MOD_RES 9: note = 8-amino-3,6-dioxaoctanoic acid
  REGION 2..8: note = cyclical region
  DISULFID 2..8: note = Cys-Cys bond
  MOD_RES 19: note = NH2
XCHFRWXCXRRRRRQRRRR

SEQ ID NO: 530 - protein, 22 aa, synthetic construct
  REGION 1..22: note = Description of sequence: MC4R agonist
  MOD_RES 1: note = Nle
  MOD_RES 4: note = d-Phenylalanine
  MOD_RES 7: note = 4Abu
  MOD_RES 9: note = 8-amino-3,6-dioxaoctanoic acid
  MOD_RES 10: note = 8-amino-3,6-dioxaoctanoic acid
  REGION 2..8: note = cyclical region
  DISULFID 2..8: note = Cys-Cys bond
  MOD_RES 22: note = NH2
XCHFRWXCXXYGRRRRRQRRRR

SEQ ID NO: 531 - protein, 20 aa, synthetic construct
  REGION 1..20: note = Description of sequence: MC4R agonist
  MOD_RES 1: note = Nle
  MOD_RES 4: note = d-Phenylalanine
  MOD_RES 7: note = 4Abu
  MOD_RES 9: note = 8-amino-3,6-dioxaoctanoic acid
  MOD_RES 10: note = 8-amino-3,6-dioxaoctanoic acid
  REGION 2..8: note = cyclical region
  DISULFID 2..8: note = Cys-Cys bond
  MOD_RES 20: note = NH2
XCHFRWXCXXRRRRRQRRRR

SEQ ID NO: 532 - protein, 12 aa, synthetic construct
  REGION 1..12: note = Description of sequence: MC4R agonist
  MOD_RES 4: note = 4-bromo-phenylalanine
  REGION 1..8: note = cyclical region
  DISULFID 1..8: note = Cys-Cys bond
  MOD_RES <1: note = Acetylated
  MOD_RES 12: note = NH2
CEHFRWGCPPKD

SEQ ID NO: 533 - protein, 12 aa, synthetic construct
  REGION 1..12: note = Description of sequence: MC4R agonist
  MOD_RES 4: note = d-beta-(2-naphthyl)alanine
  REGION 1..8: note = cyclical region
  DISULFID 1..8: note = Cys-Cys bond
  MOD_RES <1: note = Acetylated
  MOD_RES 12: note = NH2
CEHXRWACPPKD

SEQ ID NO: 534 - protein, 12 aa, synthetic construct
  REGION 1..12: note = Description of sequence: MC4R agonist
  MOD_RES 4: note = d-beta-(2-naphthyl)alanine
  MOD_RES 6: note = beta-(2-naphthyl)alanine
  REGION 1..8: note = cyclical region
  DISULFID 1..8: note = Cys-Cys bond
  MOD_RES <1: note = Acetylated
  MOD_RES 12: note = NH2
CEHXRXACPPKD

SEQ ID NO: 535 - protein, 12 aa, synthetic construct
  REGION 1..12: note = Description of sequence: MC4R agonist
  MOD_RES 4: note = d-beta-(2-naphthyl)alanine
  MOD_RES 6: note = beta-(1-naphthyl)alanine
  REGION 1..8: note = cyclical region
  DISULFID 1..8: note = Cys-Cys bond
  MOD_RES <1: note = Acetylated
  MOD_RES 12: note = NH2
CEHXRXACPPKD

SEQ ID NO: 536 - protein, 12 aa, synthetic construct
  REGION 1..12: note = Description of sequence: MC4R agonist
  MOD_RES 4: note = d-beta-(2-naphthyl)alanine
  MOD_RES 6: note = 3-benzothienylalanine
  REGION 1..8: note = cyclical region
  DISULFID 1..8: note = Cys-Cys bond
  MOD_RES <1: note = Acetylated
  MOD_RES 12: note = NH2
CEHXRXACPPKD

SEQ ID NO: 537 - protein, 12 aa, synthetic construct
  REGION 1..12: note = Description of sequence: MC4R agonist
  MOD_RES 4: note = d-beta-(2-naphthyl)alanine
  MOD_RES 6: note = beta-(2-naphthyl)alanine
  MOD_RES 7: note = Beta-alanine
  REGION 1..8: note = cyclical region
  DISULFID 1..8: note = Cys-Cys bond
  MOD_RES <1: note = Acetylated
  MOD_RES 12: note = NH2
CEHXRXACPPKD

SEQ ID NO: 538 - protein, 12 aa, synthetic construct
  REGION 1..12: note = Description of sequence: MC4R agonist
  MOD_RES 4: note = d-beta-(2-naphthyl)alanine
  MOD_RES 6: note = beta-(2-naphthyl)alanine
  MOD_RES 7: note = alpha- aminoisobutyric acid
  REGION 1..8: note = cyclical region
  DISULFID 1..8: note = Cys-Cys bond
  MOD_RES <1: note = Acetylated
  MOD_RES 12: note = NH2
CEHXRXXCPPKD

SEQ ID NO: 539 - protein, 8 aa, synthetic construct
  REGION 1..8: note = Description of sequence: MC4R agonist
  MOD_RES 1: note = Hydantoin(O)(Nle
  MOD_RES 2: note = Cys
  MOD_RES 3: note = d-Alanine
  MOD_RES 5: note = d-Phenylalanine
  REGION 1..8: note = cyclical region
  CROSSLNK 1..8: note = Nle-Cys bond
  MOD_RES 8: note = NH2
XCAHFRWC

SEQ ID NO: 540 - protein, 8 aa, synthetic construct
  REGION 1..8: note = Description of sequence: MC4R agonist
  MOD_RES 1: note = Hydantoin(O)(Ala
  MOD_RES 2: note = Cys
  MOD_RES 3: note = d-Alanine
  MOD_RES 5: note = d-Phenylalanine
  REGION 1..8: note = cyclical region
  CROSSLNK 1..8: note = Ala-Cys bond
  MOD_RES 8: note = NH2
ACAHFRWC

SEQ ID NO: 541 - protein, 8 aa, synthetic construct
  REGION 1..8: note = Description of sequence: MC4R agonist
  MOD_RES 1: note = Hydantoin(O)(d-Alanine
  MOD_RES 2: note = Cys
  MOD_RES 3: note = d-Alanine
  MOD_RES 5: note = d-Phenylalanine
  REGION 1..8: note = cyclical region
  CROSSLNK 1..8: note = dAla-Cys bond
  MOD_RES 8: note = NH2
ACAHFRWC

SEQ ID NO: 542 - protein, 8 aa, synthetic construct
  REGION 1..8: note = Description of sequence: MC4R agonist
  MOD_RES 1: note = Hydantoin(O)(alpha- aminoisobutyric acid
  MOD_RES 2: note = Cys
  MOD_RES 3: note = d-Alanine
  MOD_RES 5: note = d-Phenylalanine
  REGION 1..8: note = cyclical region
  CROSSLNK 1..8: note = Aib-Cys bond
  MOD_RES 8: note = NH2
XCAHFRWC

SEQ ID NO: 543 - protein, 8 aa, synthetic construct
  REGION 1..8: note = Description of sequence: MC4R agonist
  MOD_RES 1: note = Hydantoin(O)(Val
  MOD_RES 2: note = Cys
  MOD_RES 3: note = d-Alanine
  MOD_RES 5: note = d-Phenylalanine
  REGION 1..8: note = cyclical region
  CROSSLNK 1..8: note = Val-Cys bond
  MOD_RES 8: note = NH2
VCAHFRWC

SEQ ID NO: 544 - protein, 8 aa, synthetic construct
  REGION 1..8: note = Description of sequence: MC4R agonist
  MOD_RES 1: note = Hydantoin(O)(Abu
  MOD_RES 2: note = Cys
  MOD_RES 3: note = d-Alanine
  MOD_RES 5: note = d-Phenylalanine
  REGION 1..8: note = cyclical region
  CROSSLNK 1..8: note = Abu-Cys bond
  MOD_RES 8: note = NH2
XCAHFRWC

SEQ ID NO: 545 - protein, 8 aa, synthetic construct
  REGION 1..8: note = Description of sequence: MC4R agonist
  MOD_RES 1: note = Hydantoin(O)(Leu
  MOD_RES 2: note = Cys
  MOD_RES 3: note = d-Alanine
  MOD_RES 5: note = d-Phenylalanine
  REGION 1..8: note = cyclical region
  CROSSLNK 1..8: note = Leu-Cys bond
  MOD_RES 8: note = NH2
LCAHFRWC

SEQ ID NO: 546 - protein, 8 aa, synthetic construct
  REGION 1..8: note = Description of sequence: MC4R agonist
  MOD_RES 1: note = Hydantoin(O)(Ile
  MOD_RES 2: note = Cys
  MOD_RES 3: note = d-Alanine
  MOD_RES 5: note = d-Phenylalanine
  REGION 1..8: note = cyclical region
  CROSSLNK 1..8: note = Ile-Cys bond
  MOD_RES 8: note = NH2
ICAHFRWC

SEQ ID NO: 547 - protein, 8 aa, synthetic construct
  REGION 1..8: note = Description of sequence: MC4R agonist
  MOD_RES 1: note = Hydantoin(O)(beta-cyclohexylalanine
  MOD_RES 2: note = Cys
  MOD_RES 3: note = d-Alanine
  MOD_RES 5: note = d-Phenylalanine
  REGION 1..8: note = cyclical region
  CROSSLNK 1..8: note = Cha-Cys bond
  MOD_RES 8: note = NH2
XCAHFRWC

SEQ ID NO: 548 - protein, 8 aa, synthetic construct
  REGION 1..8: note = Description of sequence: MC4R agonist
  MOD_RES 1: note = Hydantoin(O)(1-amino-1-cyclohexanecarboxylic acid
  MOD_RES 2: note = Cys
  MOD_RES 3: note = d-Alanine
  MOD_RES 5: note = d-Phenylalanine
  REGION 1..8: note = cyclical region
  CROSSLNK 1..8: note = A6c-Cys bond
  MOD_RES 8: note = NH2
XCAHFRWC

SEQ ID NO: 549 - protein, 8 aa, synthetic construct
  REGION 1..8: note = Description of sequence: MC4R agonist
  MOD_RES 1: note = Hydantoin(O)(Phe
  MOD_RES 2: note = Cys
  MOD_RES 3: note = d-Alanine
  MOD_RES 5: note = d-Phenylalanine
  REGION 1..8: note = cyclical region
  CROSSLNK 1..8: note = Phe-Cys bond
  MOD_RES 8: note = NH2
FCAHFRWC

SEQ ID NO: 550 - protein, 8 aa, synthetic construct
  REGION 1..8: note = Description of sequence: MC4R agonist
  MOD_RES 1: note = Hydantoin(O)(Gly
  MOD_RES 2: note = Cys
  MOD_RES 3: note = d-Alanine
  MOD_RES 5: note = d-Phenylalanine
  REGION 1..8: note = cyclical region
  CROSSLNK 1..8: note = Gly-Cys bond
  MOD_RES 8: note = NH2
GCAHFRWC

SEQ ID NO: 551 - protein, 8 aa, synthetic construct
  REGION 1..8: note = Description of sequence: MC4R agonist
  MOD_RES 1: note = Hydantoin(O)(Gly
  MOD_RES 2: note = Cys
  MOD_RES 5: note = d-Phenylalanine
  REGION 1..8: note = cyclical region
  CROSSLNK 1..8: note = Gly-Cys bond
  MOD_RES 8: note = NH2
GCEHFRWC

SEQ ID NO: 552 - protein, 9 aa, synthetic construct
  REGION 1..9: note = Description of sequence: MC4R agonist
  MOD_RES 4: note = d-Alanine
  MOD_RES 6: note = d-Phenylalanine
  REGION 3..9: note = cyclical region
  DISULFID 3..9: note = Cys-Cys bond
  MOD_RES <1: note = Acetylated
  MOD_RES 9: note = NH2
YRCAHFRWC

SEQ ID NO: 553 - protein, 9 aa, synthetic construct
  REGION 1..9: note = Description of sequence: MC4R agonist
  MOD_RES 1: note = beta-(2-naphthyl)alanine
  MOD_RES 4: note = d-Alanine
  MOD_RES 6: note = d-Phenylalanine
  REGION 3..9: note = cyclical region
  DISULFID 3..9: note = Cys-Cys bond
  MOD_RES <1: note = Acetylated
  MOD_RES 9: note = NH2
XRCAHFRWC

SEQ ID NO: 554 - protein, 9 aa, synthetic construct
  REGION 1..9: note = Description of sequence: MC4R agonist
  MOD_RES 1: note = beta-(1-naphthyl)alanine
  MOD_RES 4: note = d-Alanine
  MOD_RES 6: note = d-Phenylalanine
  REGION 3..9: note = cyclical region
  DISULFID 3..9: note = Cys-Cys bond
  MOD_RES <1: note = Acetylated
  MOD_RES 9: note = NH2
XRCAHFRWC

SEQ ID NO: 555 - protein, 9 aa, synthetic construct
  REGION 1..9: note = Description of sequence: MC4R agonist
  MOD_RES 4: note = d-Alanine
  MOD_RES 6: note = d-Phenylalanine
  REGION 3..9: note = cyclical region
  DISULFID 3..9: note = Cys-Cys bond
  MOD_RES <1: note = Acetylated
  MOD_RES 9: note = NH2
FRCAHFRWC

SEQ ID NO: 556 - protein, 9 aa, synthetic construct
  REGION 1..9: note = Description of sequence: MC4R agonist
  MOD_RES 4: note = d-Alanine
  MOD_RES 6: note = d-Phenylalanine
  REGION 3..9: note = cyclical region
  DISULFID 3..9: note = Cys-Cys bond
  MOD_RES <1: note = Acetylated
  MOD_RES 9: note = NH2
WRCAHFRWC

SEQ ID NO: 557 - protein, 9 aa, synthetic construct
  REGION 1..9: note = Description of sequence: MC4R agonist
  MOD_RES 1: note = (S)-pentafluorophenylalanine
  MOD_RES 4: note = d-Alanine
  MOD_RES 6: note = d-Phenylalanine
  REGION 3..9: note = cyclical region
  DISULFID 3..9: note = Cys-Cys bond
  MOD_RES <1: note = Acetylated
  MOD_RES 9: note = NH2
XRCAHFRWC

SEQ ID NO: 558 - protein, 10 aa, synthetic construct
  REGION 1..10: note = Description of sequence: MC4R agonist
  MOD_RES 5: note = d-Alanine
  MOD_RES 7: note = d-Phenylalanine
  REGION 4..10: note = cyclical region
  DISULFID 4..10: note = Cys-Cys bond
  MOD_RES 10: note = NH2
HHRCAHFRWC

SEQ ID NO: 559 - protein, 9 aa, synthetic construct
  REGION 1..9: note = Description of sequence: MC4R agonist
  MOD_RES 4: note = d-Alanine
  MOD_RES 6: note = d-Phenylalanine
  REGION 3..9: note = cyclical region
  DISULFID 3..9: note = Cys-Cys bond
  MOD_RES <1: note = Acetylated
  MOD_RES 9: note = NH2
HRCAHFRWC

SEQ ID NO: 560 - protein, 8 aa, synthetic construct
  REGION 1..8: note = Description of sequence: MC4R agonist
  MOD_RES 3: note = d-Alanine
  MOD_RES 5: note = (S)-pentafluorophenylalanine
  REGION 2..8: note = cyclical region
  DISULFID 2..8: note = Cys-Cys bond
  MOD_RES <1: note = Acetylated
  MOD_RES 8: note = NH2
RCAHXRWC

SEQ ID NO: 561 - protein, 8 aa, synthetic construct
  REGION 1..8: note = Description of sequence: MC4R agonist
  MOD_RES 3: note = d-Alanine
  MOD_RES 5: note = d-Phenylalanine
  REGION 2..8: note = cyclical region
  DISULFID 2..8: note = Cys-Cys bond
  MOD_RES <1: note = Acetylated
  MOD_RES 8: note = NH2
RCAPFRWC

SEQ ID NO: 562 - protein, 8 aa, synthetic construct
  REGION 1..8: note = Description of sequence: MC4R agonist
  MOD_RES 3: note = d-Alanine
  MOD_RES 5: note = (S)-pentafluorophenylalanine
  REGION 2..8: note = cyclical region
  DISULFID 2..8: note = Cys-Cys bond
  MOD_RES <1: note = Acetylated
  MOD_RES 8: note = NH2
RCAPXRWC

SEQ ID NO: 563 - protein, 8 aa, synthetic construct
  REGION 1..8: note = Description of sequence: MC4R agonist
  MOD_RES 3: note = d-Alanine
  MOD_RES 5: note = (S)-pentafluorophenylalanine
  REGION 2..8: note = cyclical region
  DISULFID 2..8: note = Cys-Cys bond
  MOD_RES <1: note = Acetylated
  MOD_RES 8: note = NH2
RCAPXRWC

SEQ ID NO: 564 - protein, 8 aa, synthetic construct
  REGION 1..8: note = Description of sequence: MC4R agonist
  MOD_RES 3: note = d-Alanine
  MOD_RES 5: note = (S)-pentafluorophenylalanine
  REGION 2..8: note = cyclical region
  DISULFID 2..8: note = Cys-Cys bond
  MOD_RES <1: note = Acetylated
  MOD_RES 8: note = NH2
RCASXRWC

SEQ ID NO: 565 - protein, 8 aa, synthetic construct
  REGION 1..8: note = Description of sequence: MC4R agonist
  MOD_RES 3: note = d-Alanine
  MOD_RES 5: note = d-PhenylalanineCN
  REGION 2..8: note = cyclical region
  DISULFID 2..8: note = Cys-Cys bond
  MOD_RES <1: note = Acetylated
  MOD_RES 8: note = NH2
RCATFRWC

SEQ ID NO: 566 - protein, 8 aa, synthetic construct
  REGION 1..8: note = Description of sequence: MC4R agonist
  MOD_RES 3: note = d-Alanine
  MOD_RES 5: note = d-Phenylalanine
  REGION 2..8: note = cyclical region
  DISULFID 2..8: note = Cys-Cys bond
  MOD_RES <1: note = Acetylated
  MOD_RES 8: note = NH2
RCANFRWC

SEQ ID NO: 567 - protein, 8 aa, synthetic construct
  REGION 1..8: note = Description of sequence: MC4R agonist
  MOD_RES 3: note = d-Alanine
  MOD_RES 5: note = d-Phenylalanine
  REGION 2..8: note = cyclical region
  DISULFID 2..8: note = Cys-Cys bond
  MOD_RES <1: note = Acetylated
  MOD_RES 8: note = NH2
RCAQFRWC

SEQ ID NO: 568 - protein, 8 aa, synthetic construct
  REGION 1..8: note = Description of sequence: MC4R agonist
  MOD_RES 3: note = d-Alanine
  MOD_RES 5: note = d-Phenylalanine
  REGION 2..8: note = cyclical region
  DISULFID 2..8: note = Cys-Cys bond
  MOD_RES <1: note = Acetylated
  MOD_RES 8: note = NH2
RCAWFRWC

SEQ ID NO: 569 - protein, 8 aa, synthetic construct
  REGION 1..8: note = Description of sequence: MC4R agonist
  MOD_RES 3: note = d-Valine
  MOD_RES 5: note = d-Phenylalanine
  REGION 2..8: note = cyclical region
  DISULFID 2..8: note = Cys-Cys bond
  MOD_RES <1: note = Acetylated
  MOD_RES 8: note = NH2
RCVHFRWC

SEQ ID NO: 570 - protein, 8 aa, synthetic construct
  REGION 1..8: note = Description of sequence: MC4R agonist
  MOD_RES 3: note = d-Valine
  MOD_RES 5: note = d-Phenylalanine
  REGION 2..8: note = cyclical region
  DISULFID 2..8: note = Cys-Cys bond
  MOD_RES <1: note = Acetylated
  MOD_RES 8: note = NH2
RCVQFRWC

SEQ ID NO: 571 - protein, 8 aa, synthetic construct
  REGION 1..8: note = Description of sequence: MC4R agonist
  MOD_RES 3: note = d-Valine
  MOD_RES 5: note = d-Phenylalanine
  REGION 2..8: note = cyclical region
  DISULFID 2..8: note = Cys-Cys bond
  MOD_RES <1: note = Acetylated
  MOD_RES 8: note = NH2
RCVPFRWC

SEQ ID NO: 572 - protein, 8 aa, synthetic construct
  REGION 1..8: note = Description of sequence: MC4R agonist
  MOD_RES 3: note = dSer
  MOD_RES 5: note = d-Phenylalanine
  REGION 2..8: note = cyclical region
  DISULFID 2..8: note = Cys-Cys bond
  MOD_RES <1: note = Acetylated
  MOD_RES 8: note = NH2
RCSPFRWC

SEQ ID NO: 573 - protein, 7 aa, synthetic construct
  REGION 1..7: note = Description of sequence: MC4R agonist
  MOD_RES 2: note = Homocysteine
  MOD_RES 3: note = d-Alanine
  MOD_RES 4: note = d-Phenylalanine
  REGION 2..7: note = cyclical region
  DISULFID 2..7: note = hCys-Cys bond
  MOD_RES <1: note = Acetylated
  MOD_RES 7: note = NH2
RCAFRWC

SEQ ID NO: 574 - protein, 7 aa, synthetic construct
  REGION 1..7: note = Description of sequence: MC4R agonist
  MOD_RES 2: note = Homocysteine
  MOD_RES 4: note = d-Phenylalanine
  REGION 2..7: note = cyclical region
  DISULFID 2..7: note = hCys-Cys bond
  MOD_RES <1: note = Acetylated
  MOD_RES 7: note = NH2
RCAFRWC

SEQ ID NO: 575 - protein, 7 aa, synthetic construct
  REGION 1..7: note = Description of sequence: MC4R agonist
  MOD_RES 2: note = Homocysteine
  MOD_RES 4: note = d-Phenylalanine
  REGION 2..7: note = cyclical region
  DISULFID 2..7: note = hCys-Cys bond
  MOD_RES <1: note = Acetylated
  MOD_RES 7: note = OH
RCAFRWC

SEQ ID NO: 576 - protein, 7 aa, synthetic construct
  REGION 1..7: note = Description of sequence: MC4R agonist
  MOD_RES 3: note = d-Alanine
  MOD_RES 4: note = d-Phenylalanine
  MOD_RES 7: note = Homocysteine
  REGION 2..7: note = cyclical region
  DISULFID 2..7: note = Cys-hCys bond
  MOD_RES <1: note = Acetylated
  MOD_RES 7: note = NH2
RCAFRWC

SEQ ID NO: 577 - protein, 7 aa, synthetic construct
  REGION 1..7: note = Description of sequence: MC4R agonist
  MOD_RES 2: note = Penicillamine
  MOD_RES 3: note = d-Alanine
  MOD_RES 4: note = d-Phenylalanine
  MOD_RES 7: note = Homocysteine
  REGION 2..7: note = cyclical region
  DISULFID 2..7: note = Pen-hCys bond
  MOD_RES <1: note = Acetylated
  MOD_RES 7: note = NH2
RXAFRWC

SEQ ID NO: 578 - protein, 7 aa, synthetic construct
  REGION 1..7: note = Description of sequence: MC4R agonist
  MOD_RES 2: note = Homocysteine
  MOD_RES 3: note = d-Alanine
  MOD_RES 4: note = (S)-pentafluorophenylalanine
  REGION 2..7: note = cyclical region
  DISULFID 2..7: note = hCys-Cys bond
  MOD_RES <1: note = Acetylated
  MOD_RES 7: note = NH2
RCAXRWC

SEQ ID NO: 579 - protein, 7 aa, synthetic construct
  REGION 1..7: note = Description of sequence: MC4R agonist
  MOD_RES 2: note = Homocysteine
  MOD_RES 4: note = d-Phenylalanine
  REGION 2..7: note = cyclical region
  DISULFID 2..7: note = hCys-Cys bond
  MOD_RES <1: note = Acetylated
  MOD_RES 7: note = NH2
RCPFRWC

SEQ ID NO: 580 - protein, 7 aa, synthetic construct
  REGION 1..7: note = Description of sequence: MC4R agonist
  MOD_RES 1: note = Nle
  MOD_RES 2: note = Homocysteine
  MOD_RES 4: note = d-Phenylalanine
  REGION 2..7: note = cyclical region
  DISULFID 2..7: note = hCys-Cys bond
  MOD_RES <1: note = Acetylated
  MOD_RES 7: note = NH2
XCPFRWC

SEQ ID NO: 581 - protein, 7 aa, synthetic construct
  REGION 1..7: note = Description of sequence: MC4R agonist
  MOD_RES 2: note = Homocysteine
  MOD_RES 4: note = d-Phenylalanine
  REGION 2..7: note = cyclical region
  DISULFID 2..7: note = hCys-Cys bond
  MOD_RES 7: note = NH2
RCPFRWC

SEQ ID NO: 582 - protein, 6 aa, synthetic construct
  REGION 1..6: note = Description of sequence: MC4R agonist
  MOD_RES 1: note = Homocysteine
  MOD_RES 3: note = d-Phenylalanine
  REGION 1..6: note = cyclical region
  DISULFID 1..6: note = hCys-Cys bond
  MOD_RES 6: note = NH2
CPFRWC

SEQ ID NO: 583 - protein, 6 aa, synthetic construct
  REGION 1..6: note = Description of sequence: MC4R agonist
  MOD_RES 1: note = Homocysteine
  MOD_RES 3: note = d-Phenylalanine
  REGION 1..6: note = cyclical region
  DISULFID 1..6: note = hCys-Cys bond
  MOD_RES 6: note = NH2
CPFRWC

SEQ ID NO: 584 - protein, 7 aa, synthetic construct
  REGION 1..7: note = Description of sequence: MC4R agonist
  MOD_RES 3: note = d-Alanine
  MOD_RES 4: note = d-Phenylalanine
  MOD_RES 7: note = Dbu
  REGION 2..7: note = cyclical region
  CROSSLNK 2..7: note = Asp-Dbu bond
  MOD_RES <1: note = Acetylated
  MOD_RES 7: note = NH2
RDAFRWX

SEQ ID NO: 585 - protein, 7 aa, synthetic construct
  REGION 1..7: note = Description of sequence: MC4R agonist
  MOD_RES 3: note = d-Alanine
  MOD_RES 4: note = d-Phenylalanine
  MOD_RES 7: note = Dpr
  REGION 2..7: note = cyclical region
  CROSSLNK 2..7: note = Glu-Dpr bond
  MOD_RES <1: note = Acetylated
  MOD_RES 7: note = NH2
REAFRWX

SEQ ID NO: 586 - protein, 7 aa, synthetic construct
  REGION 1..7: note = Description of sequence: MC4R agonist
  MOD_RES 4: note = d-Phenylalanine
  MOD_RES 7: note = Dpr
  REGION 2..7: note = cyclical region
  CROSSLNK 2..7: note = Glu-Dpr bond
  MOD_RES <1: note = Acetylated
  MOD_RES 7: note = NH2
REAFRWX

SEQ ID NO: 587 - protein, 7 aa, synthetic construct
  REGION 1..7: note = Description of sequence: MC4R agonist
  MOD_RES 2: note = Dpr
  MOD_RES 3: note = d-Alanine
  MOD_RES 4: note = d-Phenylalanine
  REGION 2..7: note = cyclical region
  CROSSLNK 2..7: note = Dpr-Glu bond
  MOD_RES <1: note = Acetylated
  MOD_RES 7: note = NH2
RXAFRWE

SEQ ID NO: 588 - protein, 7 aa, synthetic construct
  REGION 1..7: note = Description of sequence: MC4R agonist
  MOD_RES 2: note = Dpr
  MOD_RES 3: note = d-Alanine
  MOD_RES 4: note = d-Phenylalanine4F
  REGION 2..7: note = cyclical region
  CROSSLNK 2..7: note = Dpr-Glu bond
  MOD_RES <1: note = Acetylated
  MOD_RES 7: note = NH2
RXAFRWE

SEQ ID NO: 589 - protein, 7 aa, synthetic construct
  REGION 1..7: note = Description of sequence: MC4R agonist
  MOD_RES 2: note = Dpr
  MOD_RES 4: note = d-Phenylalanine
  REGION 2..7: note = cyclical region
  CROSSLNK 2..7: note = Dpr-Glu bond
  MOD_RES <1: note = Acetylated
  MOD_RES 7: note = NH2
RXAFRWE

SEQ ID NO: 590 - protein, 7 aa, synthetic construct
  REGION 1..7: note = Description of sequence: MC4R agonist
  MOD_RES 2: note = Dpr
  MOD_RES 4: note = d-Phenylalanine
  REGION 2..7: note = cyclical region
  CROSSLNK 2..7: note = Dpr-Glu bond
  MOD_RES <1: note = Acetylated
  MOD_RES 7: note = OH
RXAFRWE

SEQ ID NO: 591 - protein, 7 aa, synthetic construct
  REGION 1..7: note = Description of sequence: MC4R agonist
  MOD_RES 1: note = Nle
  MOD_RES 2: note = Dpr
  MOD_RES 4: note = d-Phenylalanine
  REGION 2..7: note = cyclical region
  CROSSLNK 2..7: note = Dpr-Glu bond
  MOD_RES <1: note = Acetylated
  MOD_RES 7: note = NH2
XXAFRWE

SEQ ID NO: 592 - protein, 7 aa, synthetic construct
  REGION 1..7: note = Description of sequence: MC4R agonist
  MOD_RES 2: note = Dpr
  MOD_RES 4: note = d-Phenylalanine
  REGION 2..7: note = cyclical region
  CROSSLNK 2..7: note = Dpr-Glu bond
  MOD_RES 7: note = NH2
RXAFRWE

SEQ ID NO: 593 - protein, 6 aa, synthetic construct
  REGION 1..6: note = Description of sequence: MC4R agonist
  MOD_RES 1: note = Dpr
  MOD_RES 3: note = d-Phenylalanine
  REGION 1..6: note = cyclical region
  CROSSLNK 1..6: note = Dpr-Glu bond
  MOD_RES 6: note = NH2
XAFRWE

SEQ ID NO: 594 - protein, 6 aa, synthetic construct
  REGION 1..6: note = Description of sequence: MC4R agonist
  MOD_RES 1: note = Dpr
  MOD_RES 3: note = d-Phenylalanine
  REGION 1..6: note = cyclical region
  CROSSLNK 1..6: note = Dpr-Glu bond
  MOD_RES 6: note = NH2
XAFRWE

SEQ ID NO: 595 - protein, 8 aa, synthetic construct
  REGION 1..8: note = Description of sequence: MC4R agonist
  MOD_RES 3: note = d-Alanine
  MOD_RES 4: note = 3-methylhistidine
  MOD_RES 5: note = d-Phenylalanine
  REGION 2..7: note = cyclical region
  CROSSLNK 2..7: note = Cys-Trp bond
  MOD_RES <1: note = Acetylated
  MOD_RES 8: note = NH2
RCAHFRWC

SEQ ID NO: 596 - protein, 8 aa, synthetic construct
  REGION 1..8: note = Description of sequence: MC4R agonist
  MOD_RES 3: note = d-Alanine
  MOD_RES 4: note = 1-methylhistidine
  MOD_RES 5: note = d-Phenylalanine
  REGION 2..7: note = cyclical region
  CROSSLNK 2..7: note = Cys-Trp bond
  MOD_RES <1: note = Acetylated
  MOD_RES 8: note = NH2
RCAHFRWC

SEQ ID NO: 597 - protein, 8 aa, synthetic construct
  REGION 1..8: note = Description of sequence: MC4R agonist
  MOD_RES 3: note = d-Alanine
  MOD_RES 5: note = d-Phenylalanine
  REGION 2..7: note = cyclical region
  CROSSLNK 2..7: note = Cys-Trp bond
  MOD_RES <1: note = Acetylated
  MOD_RES 8: note = NH2
RCARFRWC

SEQ ID NO: 598 - protein, 8 aa, synthetic construct
  REGION 1..8: note = Description of sequence: MC4R agonist
  MOD_RES 3: note = d-Alanine
  MOD_RES 5: note = d-Phenylalanine
  REGION 2..7: note = cyclical region
  CROSSLNK 2..7: note = Cys-Trp bond
  MOD_RES <1: note = Acetylated
  MOD_RES 8: note = NH2
RCAYFRWC

SEQ ID NO: 599 - protein, 8 aa, synthetic construct
  REGION 1..8: note = Description of sequence: MC4R agonist
  MOD_RES 3: note = d-Alanine
  MOD_RES 4: note = D-Proline
  MOD_RES 5: note = d-Phenylalanine
  REGION 2..7: note = cyclical region
  CROSSLNK 2..7: note = Cys-Trp bond
  MOD_RES <1: note = Acetylated
  MOD_RES 8: note = NH2
RCAPFRWC

SEQ ID NO: 600 - protein, 8 aa, synthetic construct
  REGION 1..8: note = Description of sequence: MC4R agonist
  MOD_RES 3: note = d-Alanine
  MOD_RES 4: note = 2-aminotetralin-2-carboxylic acid
  MOD_RES 5: note = d-Phenylalanine
  REGION 2..7: note = cyclical region
  CROSSLNK 2..7: note = Cys-Trp bond
  MOD_RES <1: note = Acetylated
  MOD_RES 8: note = NH2
RCAXFRWC

SEQ ID NO: 601 - protein, 8 aa, synthetic construct
  REGION 1..8: note = Description of sequence: MC4R agonist
  MOD_RES 3: note = d-Alanine
  MOD_RES 4: note = 2-amino-3-(quinolin-3-yl)propanoic acid
  MOD_RES 5: note = d-Phenylalanine
  REGION 2..8: note = cyclical region
  DISULFID 2..8: note = Cys-Cys bond
  MOD_RES <1: note = Acetylated
  MOD_RES >8: note = NH2
RCAXFRWC

SEQ ID NO: 602 - protein, 8 aa, synthetic construct
  REGION 1..8: note = Description of sequence: MC4R agonist
  MOD_RES 3: note = d-Alanine
  MOD_RES 4: note = 1-amino-4-cyclohexane-1-carboxylic acid
  MOD_RES 5: note = d-Phenylalanine
  REGION 2..7: note = cyclical region
  DISULFID 2..7: note = Cys-Cys bond
  MOD_RES <1: note = Acetylated
  MOD_RES 8: note = NH2
RCAXFRWC

SEQ ID NO: 603 - protein, 8 aa, synthetic construct
  REGION 1..8: note = Description of sequence: MC4R agonist
  MOD_RES 3: note = d-Alanine
  MOD_RES 4: note = 2-amino-3-(1H-pyrazol-1-yl)propanoic acid
  MOD_RES 5: note = d-Phenylalanine
  REGION 2..7: note = cyclical region
  DISULFID 2..7: note = Cys-Cys bond
  MOD_RES <1: note = Acetylated
  MOD_RES 8: note = NH2
RCAXFRWC

SEQ ID NO: 604 - protein, 7 aa, synthetic construct
  REGION 1..7: note = Description of sequence: MC4R agonist
  MOD_RES 2: note = Homocysteine
  MOD_RES 3: note = d-Alanine
  MOD_RES 4: note = d-Phenylalanine
  MOD_RES 7: note = Penicillamine
  REGION 2..7: note = cyclical region
  CROSSLNK 2..7: note = hCys-Pen bond
  MOD_RES <1: note = Acetylated
  MOD_RES 7: note = NH2
RCAFRWX

SEQ ID NO: 605 - protein, 7 aa, synthetic construct
  REGION 1..7: note = Description of sequence: MC4R agonist
  MOD_RES 2: note = Homocysteine
  MOD_RES 3: note = alpha- aminoisobutyric acid
  MOD_RES 4: note = d-Phenylalanine
  REGION 2..7: note = cyclical region
  DISULFID 2..7: note = hCys-Cys bond
  MOD_RES <1: note = Acetylated
  MOD_RES 7: note = NH2
RCXFRWC

SEQ ID NO: 606 - protein, 7 aa, synthetic construct
  REGION 1..7: note = Description of sequence: MC4R agonist
  MOD_RES 2: note = Homocysteine
  MOD_RES 3: note = MeGly
  MOD_RES 4: note = d-Phenylalanine
  REGION 2..7: note = cyclical region
  DISULFID 2..7: note = hCys-Cys bond
  MOD_RES <1: note = Acetylated
  MOD_RES 7: note = NH2
RCXFRWC

SEQ ID NO: 607 - protein, 7 aa, synthetic construct
  REGION 1..7: note = Description of sequence: MC4R agonist
  MOD_RES 2: note = Homocysteine
  MOD_RES 4: note = d-Phenylalanine
  REGION 2..7: note = cyclical region
  DISULFID 2..7: note = hCys-Cys bond
  MOD_RES <1: note = Acetylated
  MOD_RES 7: note = NH2
RCVFRWC

SEQ ID NO: 608 - protein, 7 aa, synthetic construct
  REGION 1..7: note = Description of sequence: MC4R agonist
  MOD_RES 2: note = Homocysteine
  MOD_RES 3: note = d-Valine
  MOD_RES 4: note = d-Phenylalanine
  REGION 2..7: note = cyclical region
  DISULFID 2..7: note = hCys-Cys bond
  MOD_RES <1: note = Acetylated
  MOD_RES 7: note = NH2
RCVFRWC

SEQ ID NO: 609 - protein, 7 aa, synthetic construct
  REGION 1..7: note = Description of sequence: MC4R agonist
  MOD_RES 2: note = Homocysteine
  MOD_RES 4: note = d-Phenylalanine
  REGION 2..7: note = cyclical region
  DISULFID 2..7: note = hCys-Cys bond
  MOD_RES <1: note = Acetylated
  MOD_RES 7: note = NH2
RCQFRWC

SEQ ID NO: 610 - protein, 7 aa, synthetic construct
  REGION 1..7: note = Description of sequence: MC4R agonist
  MOD_RES 2: note = Homocysteine
  MOD_RES 3: note = D-glutamine
  MOD_RES 4: note = d-Phenylalanine
  REGION 2..7: note = cyclical region
  DISULFID 2..7: note = hCys-Cys bond
  MOD_RES <1: note = Acetylated
  MOD_RES 7: note = NH2
RCQFRWC

SEQ ID NO: 611 - protein, 7 aa, synthetic construct
  REGION 1..7: note = Description of sequence: MC4R agonist
  MOD_RES 2: note = Homocysteine
  MOD_RES 4: note = d-Phenylalanine
  MOD_RES 7: note = Penicillamine
  REGION 2..7: note = cyclical region
  DISULFID 2..7: note = hCys-Pen bond
  MOD_RES <1: note = Acetylated
  MOD_RES 7: note = NH2
RCAFRWX

SEQ ID NO: 612 - protein, 7 aa, synthetic construct
  REGION 1..7: note = Description of sequence: MC4R agonist
  MOD_RES 2: note = dPenicillamine
  MOD_RES 3: note = d-Alanine
  MOD_RES 4: note = d-Phenylalanine
  MOD_RES 7: note = Homocysteine
  REGION 2..7: note = cyclical region
  DISULFID 2..7: note = dPen-hCys bond
  MOD_RES <1: note = Acetylated
  MOD_RES 7: note = NH2
RXAFRWC

SEQ ID NO: 613 - protein, 7 aa, synthetic construct
  REGION 1..7: note = Description of sequence: MC4R agonist
  MOD_RES 2: note = Penicillamine
  MOD_RES 3: note = d-Alanine
  MOD_RES 4: note = d-Phenylalanine
  MOD_RES 7: note = Homocysteine
  REGION 2..7: note = cyclical region
  CROSSLNK 2..7: note = Pen-hCys bond
  MOD_RES <1: note = Acetylated
  MOD_RES 7: note = NH2
RXAFRWC

SEQ ID NO: 614 - protein, 7 aa, synthetic construct
  REGION 1..7: note = Description of sequence: MC4R agonist
  MOD_RES 2: note = dHomocysteine
  MOD_RES 3: note = d-Alanine
  MOD_RES 4: note = d-Phenylalanine
  REGION 2..7: note = cyclical region
  DISULFID 2..7: note = dhCys-Cys bond
  MOD_RES <1: note = Acetylated
  MOD_RES 7: note = NH2
RCAFRWC

SEQ ID NO: 615 - protein, 7 aa, synthetic construct
  REGION 1..7: note = Description of sequence: MC4R agonist
  MOD_RES 2: note = Homocysteine
  MOD_RES 3: note = D-Proline
  MOD_RES 4: note = d-Phenylalanine
  REGION 2..7: note = cyclical region
  DISULFID 2..7: note = hCys-Cys bond
  MOD_RES <1: note = Acetylated
  MOD_RES 7: note = NH2
RCPFRWC

SEQ ID NO: 616 - protein, 8 aa, synthetic construct
  REGION 1..8: note = Description of sequence: MC4R agonist
  MOD_RES 5: note = d-Phenylalanine
  REGION 2..8: note = cyclical region
  DISULFID 2..8: note = Cys-Cys bond
  MOD_RES <1: note = Acetylated
  MOD_RES 8: note = NH2
RCVQFRWC

SEQ ID NO: 617 - protein, 8 aa, synthetic construct
  REGION 1..8: note = Description of sequence: MC4R agonist
  MOD_RES 3: note = d-Valine
  MOD_RES 4: note = 1-methylhistidine
  MOD_RES 5: note = d-Phenylalanine
  REGION 2..8: note = cyclical region
  DISULFID 2..8: note = Cys-Cys bond
  MOD_RES <1: note = Acetylated
  MOD_RES 8: note = NH2
RCVHFRWC

SEQ ID NO: 618 - protein, 8 aa, synthetic construct
  REGION 1..8: note = Description of sequence: MC4R agonist
  MOD_RES 1: note = 3-(1,2,4-triazol-1-yl)-L-Ala
  MOD_RES 5: note = d-Phenylalanine
  REGION 2..8: note = cyclical region
  DISULFID 2..8: note = Cys-Cys bond
  MOD_RES <1: note = Acetylated
  MOD_RES 8: note = NH2
ACAQFRWC

SEQ ID NO: 619 - protein, 8 aa, synthetic construct
  REGION 1..8: note = Description of sequence: MC4R agonist
  MOD_RES 5: note = d-Phenylalanine
  REGION 2..8: note = cyclical region
  DISULFID 2..8: note = Cys-Cys bond
  MOD_RES <1: note = Acetylated
  MOD_RES 8: note = NH2
ECAHFRWC

SEQ ID NO: 620 - protein, 8 aa, synthetic construct
  REGION 1..8: note = Description of sequence: MC4R agonist
  MOD_RES 3: note = d-Leucine
  MOD_RES 5: note = d-Phenylalanine
  REGION 2..8: note = cyclical region
  DISULFID 2..8: note = Cys-Cys bond
  MOD_RES <1: note = Acetylated
  MOD_RES 8: note = NH2
RCLHFRWC

SEQ ID NO: 621 - protein, 8 aa, synthetic construct
  REGION 1..8: note = Description of sequence: MC4R agonist
  MOD_RES 3: note = dIle
  MOD_RES 5: note = d-Phenylalanine
  REGION 2..8: note = cyclical region
  DISULFID 2..8: note = Cys-Cys bond
  MOD_RES <1: note = Acetylated
  MOD_RES 8: note = NH2
RCIHFRWC

SEQ ID NO: 622 - protein, 8 aa, synthetic construct
  REGION 1..8: note = Description of sequence: MC4R agonist
  MOD_RES 3: note = dTle
  MOD_RES 5: note = d-Phenylalanine
  REGION 2..8: note = cyclical region
  DISULFID 2..8: note = Cys-Cys bond
  MOD_RES <1: note = Acetylated
  MOD_RES 8: note = NH2
RCLHFRWC

SEQ ID NO: 623 - protein, 8 aa, synthetic construct
  REGION 1..8: note = Description of sequence: MC4R agonist
  MOD_RES 3: note = d-Alanine
  MOD_RES 4: note = 1-methylhistidine
  MOD_RES 5: note = d-beta-(2-naphthyl)alanine
  REGION 2..8: note = cyclical region
  DISULFID 2..8: note = Cys-Cys bond
  MOD_RES <1: note = Acetylated
  MOD_RES 8: note = NH2
RCAHXRWC

SEQ ID NO: 624 - protein, 8 aa, synthetic construct
  REGION 1..8: note = Description of sequence: MC4R agonist
  MOD_RES 3: note = d-Alanine
  MOD_RES 5: note = d-beta-(2-naphthyl)alanine
  REGION 2..8: note = cyclical region
  DISULFID 2..8: note = Cys-Cys bond
  MOD_RES <1: note = Acetylated
  MOD_RES 8: note = NH2
RCAQXRWC

SEQ ID NO: 625 - protein, 8 aa, synthetic construct
  REGION 1..8: note = Description of sequence: MC4R agonist
  MOD_RES 3: note = d-Alanine
  MOD_RES 5: note = d-beta-(2-naphthyl)alanine
  REGION 2..8: note = cyclical region
  DISULFID 2..8: note = Cys-Cys bond
  MOD_RES <1: note = Acetylated
  MOD_RES 8: note = NH2
RCANXRWC

SEQ ID NO: 626 - protein, 8 aa, synthetic construct
  REGION 1..8: note = Description of sequence: MC4R agonist
  MOD_RES 3: note = d-Alanine
  MOD_RES 4: note = 1-methylhistidine
  MOD_RES 5: note = d-Phenylalanine
  REGION 2..8: note = cyclical region
  DISULFID 2..8: note = Cys-Cys bond
  MOD_RES <1: note = Acetylated
  MOD_RES 8: note = OH
RCAHFRWC

SEQ ID NO: 627 - protein, 8 aa, synthetic construct
  REGION 1..8: note = Description of sequence: MC4R agonist
  MOD_RES 3: note = d-Alanine
  MOD_RES 5: note = d-Phenylalanine
  REGION 2..8: note = cyclical region
  DISULFID 2..8: note = Cys-Cys bond
  MOD_RES <1: note = Acetylated
  MOD_RES 8: note = OH
RCAQFRWC

SEQ ID NO: 628 - protein, 8 aa, synthetic construct
  REGION 1..8: note = Description of sequence: MC4R agonist
  MOD_RES 3: note = d-Alanine
  MOD_RES 5: note = d-Phenylalanine
  REGION 2..8: note = cyclical region
  DISULFID 2..8: note = Cys-Cys bond
  MOD_RES <1: note = Acetylated
  MOD_RES 8: note = OH
RCANFRWC

SEQ ID NO: 629 - protein, 7 aa, synthetic construct
  REGION 1..7: note = Description of sequence: MC4R agonist
  MOD_RES 2: note = Homocysteine
  MOD_RES 4: note = d-Phenylalanine
  MOD_RES 7: note = Penicillamine
  REGION 2..7: note = cyclical region
  CROSSLNK 2..7: note = hCys-Pen bond
  MOD_RES <1: note = Acetylated
  MOD_RES 7: note = NH2
RCNFRWX

SEQ ID NO: 630 - protein, 7 aa, synthetic construct
  REGION 1..7: note = Description of sequence: MC4R agonist
  MOD_RES 2: note = Homocysteine
  MOD_RES 4: note = d-Phenylalanine
  MOD_RES 7: note = Penicillamine
  REGION 2..7: note = cyclical region
  CROSSLNK 2..7: note = hCys-Pen bond
  MOD_RES <1: note = Acetylated
  MOD_RES 7: note = NH2
RCQFRWX

SEQ ID NO: 631 - protein, 7 aa, synthetic construct
  REGION 1..7: note = Description of sequence: MC4R agonist
  MOD_RES 2: note = Homocysteine
  MOD_RES 4: note = d-Phenylalanine
  MOD_RES 7: note = Penicillamine
  REGION 2..7: note = cyclical region
  CROSSLNK 2..7: note = hCys-Pen bond
  MOD_RES <1: note = Acetylated
  MOD_RES 7: note = NH2
RCSFRWX

SEQ ID NO: 632 - protein, 7 aa, synthetic construct
  REGION 1..7: note = Description of sequence: MC4R agonist
  MOD_RES 2: note = Homocysteine
  MOD_RES 4: note = d-Phenylalanine
  MOD_RES 7: note = Penicillamine
  REGION 2..7: note = cyclical region
  CROSSLNK 2..7: note = hCys-Pen bond
  MOD_RES <1: note = Acetylated
  MOD_RES 7: note = NH2
RCTFRWX

SEQ ID NO: 633 - protein, 7 aa, synthetic construct
  REGION 1..7: note = Description of sequence: MC4R agonist
  MOD_RES 4: note = d-Phenylalanine
  MOD_RES 7: note = diaminopropionic acid
  REGION 2..7: note = cyclical region
  CROSSLNK 2..7: note = Glu-Apr bond
  MOD_RES <1: note = Acetylated
  MOD_RES 7: note = NH2
REQFRWX

SEQ ID NO: 634 - protein, 7 aa, synthetic construct
  REGION 1..7: note = Description of sequence: MC4R agonist
  MOD_RES 2: note = Homocysteine
  MOD_RES 4: note = d-Phenylalanine
  MOD_RES 7: note = Penicillamine
  REGION 2..7: note = cyclical region
  CROSSLNK 2..7: note = hCys-Pen bond
  MOD_RES <1: note = Acetylated
  MOD_RES 7: note = OH
RCNFRWX

SEQ ID NO: 635 - protein, 8 aa, synthetic construct
  REGION 1..8: note = Description of sequence: MC4R agonist
  MOD_RES 3: note = Homocysteine
  MOD_RES 5: note = d-Phenylalanine
  MOD_RES 8: note = Penicillamine
  REGION 3..8: note = cyclical region
  CROSSLNK 3..8: note = hCys-Pen bond
  MOD_RES 8: note = NH2
HRCNFRWX

SEQ ID NO: 636 - protein, 8 aa, synthetic construct
  REGION 1..8: note = Description of sequence: MC4R agonist
  MOD_RES 3: note = Homocysteine
  MOD_RES 5: note = d-Phenylalanine
  MOD_RES 8: note = Penicillamine
  REGION 3..8: note = cyclical region
  CROSSLNK 3..8: note = hCys-Pen bond
  MOD_RES 8: note = OH
HRCNFRWX

SEQ ID NO: 637 - protein, 7 aa, synthetic construct
  REGION 1..7: note = Description of sequence: MC4R agonist
  MOD_RES 1: note = d-Arginine
  MOD_RES 2: note = Homocysteine
  MOD_RES 4: note = d-Phenylalanine
  MOD_RES 7: note = Penicillamine
  REGION 2..7: note = cyclical region
  CROSSLNK 2..7: note = hCys-Pen bond
  MOD_RES <1: note = Acetylated
  MOD_RES 7: note = NH2
RCNFRWX

SEQ ID NO: 638 - protein, 8 aa, synthetic construct
  REGION 1..8: note = Description of sequence: MC4R agonist
  MOD_RES 2: note = d-Arginine
  MOD_RES 3: note = Homocysteine
  MOD_RES 5: note = d-Phenylalanine
  MOD_RES 8: note = Penicillamine
  REGION 3..8: note = cyclical region
  CROSSLNK 3..8: note = hCys-Pen bond
  MOD_RES 8: note = NH2
HRCNFRWX

SEQ ID NO: 639 - protein, 7 aa, synthetic construct
  REGION 1..7: note = Description of sequence: MC4R agonist
  MOD_RES 1: note = d-Arginine
  MOD_RES 2: note = Homocysteine
  MOD_RES 4: note = d-Phenylalanine
  MOD_RES 7: note = Penicillamine
  REGION 2..7: note = cyclical region
  CROSSLNK 2..7: note = hCys-Pen bond
  MOD_RES <1: note = Acetylated
  MOD_RES 7: note = OH
RCNFRWX

SEQ ID NO: 640 - protein, 8 aa, synthetic construct
  REGION 1..8: note = Description of sequence: MC4R agonist
  MOD_RES 2: note = d-Arginine
  MOD_RES 3: note = Homocysteine
  MOD_RES 5: note = d-Phenylalanine
  MOD_RES 8: note = Penicillamine
  REGION 3..8: note = cyclical region
  CROSSLNK 3..8: note = hCys-Pen bond
  MOD_RES 8: note = OH
HRCNFRWX

SEQ ID NO: 641 - protein, 7 aa, synthetic construct
  REGION 1..7: note = Description of sequence: MC4R agonist
  MOD_RES 2: note = Homocysteine
  MOD_RES 4: note = d-Phenylalanine
  MOD_RES 7: note = Penicillamine
  REGION 2..7: note = cyclical region
  CROSSLNK 2..7: note = hCys-Pen bond
  MOD_RES <1: note = Acetylated
  MOD_RES 7: note = NH2
KCNFRWX

SEQ ID NO: 642 - protein, 7 aa, synthetic construct
  REGION 1..7: note = Description of sequence: MC4R agonist
  MOD_RES 2: note = Homocysteine
  MOD_RES 4: note = d-Phenylalanine
  MOD_RES 7: note = Penicillamine
  REGION 2..7: note = cyclical region
  CROSSLNK 2..7: note = hCys-Pen bond
  MOD_RES <1: note = Acetylated
  MOD_RES 7: note = OH
KCNFRWX

SEQ ID NO: 643 - protein, 8 aa, synthetic construct
  REGION 1..8: note = Description of sequence: MC4R agonist
  MOD_RES 3: note = Homocysteine
  MOD_RES 5: note = d-Phenylalanine
  MOD_RES 8: note = Penicillamine
  REGION 3..8: note = cyclical region
  CROSSLNK 3..8: note = hCys-Pen bond
  MOD_RES 8: note = NH2
HKCNFRWX

SEQ ID NO: 644 - protein, 8 aa, synthetic construct
  REGION 1..8: note = Description of sequence: MC4R agonist
  MOD_RES 3: note = Homocysteine
  MOD_RES 5: note = d-Phenylalanine
  MOD_RES 8: note = Penicillamine
  REGION 3..8: note = cyclical region
  CROSSLNK 3..8: note = hCys-Pen bond
  MOD_RES 8: note = OH
HKCNFRWX

SEQ ID NO: 645 - protein, 7 aa, synthetic construct
  REGION 1..7: note = Description of sequence: MC4R agonist
  MOD_RES 1: note = d-Lysine
  MOD_RES 2: note = Homocysteine
  MOD_RES 4: note = d-Phenylalanine
  MOD_RES 7: note = Penicillamine
  REGION 2..7: note = cyclical region
  CROSSLNK 2..7: note = hCys-Pen bond
  MOD_RES <1: note = Acetylated
  MOD_RES 7: note = NH2
KCNFRWX

SEQ ID NO: 646 - protein, 8 aa, synthetic construct
  REGION 1..8: note = Description of sequence: MC4R agonist
  MOD_RES 2: note = d-Lysine
  MOD_RES 3: note = Homocysteine
  MOD_RES 5: note = d-Phenylalanine
  MOD_RES 8: note = Penicillamine
  REGION 3..8: note = cyclical region
  CROSSLNK 3..8: note = hCys-Pen bond
  MOD_RES 8: note = NH2
HKCNFRWX

SEQ ID NO: 647 - protein, 7 aa, synthetic construct
  REGION 1..7: note = Description of sequence: MC4R agonist
  MOD_RES 1: note = d-Lysine
  MOD_RES 2: note = Homocysteine
  MOD_RES 4: note = d-Phenylalanine
  MOD_RES 7: note = Penicillamine
  REGION 2..7: note = cyclical region
  CROSSLNK 2..7: note = hCys-Pen bond
  MOD_RES <1: note = Acetylated
  MOD_RES 7: note = OH
KCNFRWX

SEQ ID NO: 648 - protein, 8 aa, synthetic construct
  REGION 1..8: note = Description of sequence: MC4R agonist
  MOD_RES 2: note = d-Lysine
  MOD_RES 3: note = Homocysteine
  MOD_RES 5: note = d-Phenylalanine
  MOD_RES 8: note = Penicillamine
  REGION 3..8: note = cyclical region
  CROSSLNK 3..8: note = hCys-Pen bond
  MOD_RES 8: note = OH
HKCNFRWX

SEQ ID NO: 649 - protein, 7 aa, synthetic construct
  REGION 1..7: note = Description of sequence: MC4R agonist
  MOD_RES 2: note = Homocysteine
  MOD_RES 4: note = d-Phenylalanine
  MOD_RES 7: note = Penicillamine
  REGION 2..7: note = cyclical region
  CROSSLNK 2..7: note = hCys-Pen bond
  MOD_RES <1: note = Acetylated
  MOD_RES 7: note = OH
RCQFRWX

SEQ ID NO: 650 - protein, 8 aa, synthetic construct
  REGION 1..8: note = Description of sequence: MC4R agonist
  MOD_RES 3: note = Homocysteine
  MOD_RES 5: note = d-Phenylalanine
  MOD_RES 8: note = Penicillamine
  REGION 3..8: note = cyclical region
  CROSSLNK 3..8: note = hCys-Pen bond
  MOD_RES 8: note = NH2
HRCQFRWX

SEQ ID NO: 651 - protein, 8 aa, synthetic construct
  REGION 1..8: note = Description of sequence: MC4R agonist
  MOD_RES 3: note = Homocysteine
  MOD_RES 5: note = d-Phenylalanine
  MOD_RES 8: note = Penicillamine
  REGION 3..8: note = cyclical region
  CROSSLNK 3..8: note = hCys-Pen bond
  MOD_RES 8: note = OH
HRCQFRWX

SEQ ID NO: 652 - protein, 7 aa, synthetic construct
  REGION 1..7: note = Description of sequence: MC4R agonist
  MOD_RES 1: note = d-Arginine
  MOD_RES 2: note = Homocysteine
  MOD_RES 4: note = d-Phenylalanine
  MOD_RES 7: note = Penicillamine
  REGION 2..7: note = cyclical region
  CROSSLNK 2..7: note = hCys-Pen bond
  MOD_RES <1: note = Acetylated
  MOD_RES 7: note = NH2
RCQFRWX

SEQ ID NO: 653 - protein, 8 aa, synthetic construct
  REGION 1..8: note = Description of sequence: MC4R agonist
  MOD_RES 2: note = d-Arginine
  MOD_RES 3: note = Homocysteine
  MOD_RES 5: note = d-Phenylalanine
  MOD_RES 8: note = Penicillamine
  REGION 3..8: note = cyclical region
  CROSSLNK 3..8: note = hCys-Pen bond
  MOD_RES 8: note = NH2
HRCQFRWX

SEQ ID NO: 654 - protein, 7 aa, synthetic construct
  REGION 1..7: note = Description of sequence: MC4R agonist
  MOD_RES 1: note = d-Arginine
  MOD_RES 2: note = Homocysteine
  MOD_RES 4: note = d-Phenylalanine
  MOD_RES 7: note = Penicillamine
  REGION 2..7: note = cyclical region
  CROSSLNK 2..7: note = hCys-Pen bond
  MOD_RES <1: note = Acetylated
  MOD_RES 7: note = OH
RCQFRWX

SEQ ID NO: 655 - protein, 8 aa, synthetic construct
  REGION 1..8: note = Description of sequence: MC4R agonist
  MOD_RES 2: note = d-Arginine
  MOD_RES 3: note = Homocysteine
  MOD_RES 5: note = d-Phenylalanine
  MOD_RES 8: note = Penicillamine
  REGION 3..8: note = cyclical region
  CROSSLNK 3..8: note = hCys-Pen bond
  MOD_RES 8: note = OH
HRCQFRWX

SEQ ID NO: 656 - protein, 7 aa, synthetic construct
  REGION 1..7: note = Description of sequence: MC4R agonist
  MOD_RES 2: note = Homocysteine
  MOD_RES 4: note = d-Phenylalanine
  MOD_RES 7: note = Penicillamine
  REGION 2..7: note = cyclical region
  CROSSLNK 2..7: note = hCys-Pen bond
  MOD_RES <1: note = Acetylated
  MOD_RES 7: note = NH2
KCQFRWX

SEQ ID NO: 657 - protein, 7 aa, synthetic construct
  REGION 1..7: note = Description of sequence: MC4R agonist
  MOD_RES 2: note = Homocysteine
  MOD_RES 4: note = d-Phenylalanine
  MOD_RES 7: note = Penicillamine
  REGION 2..7: note = cyclical region
  CROSSLNK 2..7: note = hCys-Pen bond
  MOD_RES <1: note = Acetylated
  MOD_RES 7: note = OH
KCQFRWX

SEQ ID NO: 658 - protein, 8 aa, synthetic construct
  REGION 1..8: note = Description of sequence: MC4R agonist
  MOD_RES 3: note = Homocysteine
  MOD_RES 5: note = d-Phenylalanine
  MOD_RES 8: note = Penicillamine
  REGION 3..8: note = cyclical region
  CROSSLNK 3..8: note = hCys-Pen bond
  MOD_RES 8: note = NH2
HKCQFRWX

SEQ ID NO: 659 - protein, 8 aa, synthetic construct
  REGION 1..8: note = Description of sequence: MC4R agonist
  MOD_RES 3: note = Homocysteine
  MOD_RES 5: note = d-Phenylalanine
  MOD_RES 8: note = Penicillamine
  REGION 3..8: note = cyclical region
  CROSSLNK 3..8: note = hCys-Pen bond
  MOD_RES 8: note = OH
HKCQFRWX

SEQ ID NO: 660 - protein, 7 aa, synthetic construct
  REGION 1..7: note = Description of sequence: MC4R agonist
  MOD_RES 1: note = d-Lysine
  MOD_RES 2: note = Homocysteine
  MOD_RES 4: note = d-Phenylalanine
  MOD_RES 7: note = Penicillamine
  REGION 2..7: note = cyclical region
  CROSSLNK 2..7: note = hCys-Pen bond
  MOD_RES <1: note = Acetylated
  MOD_RES 7: note = NH2
KCQFRWX

SEQ ID NO: 661 - protein, 8 aa, synthetic construct
  REGION 1..8: note = Description of sequence: MC4R agonist
  MOD_RES 2: note = d-Lysine
  MOD_RES 3: note = Homocysteine
  MOD_RES 5: note = d-Phenylalanine
  MOD_RES 8: note = Penicillamine
  REGION 3..8: note = cyclical region
  CROSSLNK 3..8: note = hCys-Pen bond
  MOD_RES 8: note = NH2
HKCQFRWX

SEQ ID NO: 662 - protein, 7 aa, synthetic construct
  REGION 1..7: note = Description of sequence: MC4R agonist
  MOD_RES 1: note = d-Lysine
  MOD_RES 2: note = Homocysteine
  MOD_RES 4: note = d-Phenylalanine
  MOD_RES 7: note = Penicillamine
  REGION 2..7: note = cyclical region
  CROSSLNK 2..7: note = hCys-Pen bond
  MOD_RES <1: note = Acetylated
  MOD_RES 7: note = OH
KCQFRWX

SEQ ID NO: 663 - protein, 8 aa, synthetic construct
  REGION 1..8: note = Description of sequence: MC4R agonist
  MOD_RES 2: note = d-Lysine
  MOD_RES 3: note = Homocysteine
  MOD_RES 5: note = d-Phenylalanine
  MOD_RES 8: note = Penicillamine
  REGION 3..8: note = cyclical region
  CROSSLNK 3..8: note = hCys-Pen bond
  MOD_RES 8: note = OH
HKCQFRWX

SEQ ID NO: 664 - protein, 7 aa, synthetic construct
  REGION 1..7: note = Description of sequence: MC4R agonist
  MOD_RES 2: note = Homocysteine
  MOD_RES 4: note = d-Phenylalanine
  MOD_RES 7: note = Penicillamine
  REGION 2..7: note = cyclical region
  CROSSLNK 2..7: note = hCys-Pen bond
  MOD_RES <1: note = Acetylated
  MOD_RES 7: note = OH
RCSFRWX

SEQ ID NO: 665 - protein, 8 aa, synthetic construct
  REGION 1..8: note = Description of sequence: MC4R agonist
  MOD_RES 3: note = Homocysteine
  MOD_RES 5: note = d-Phenylalanine
  MOD_RES 8: note = Penicillamine
  REGION 3..8: note = cyclical region
  CROSSLNK 3..8: note = hCys-Pen bond
  MOD_RES 8: note = NH2
HRCSFRWX

SEQ ID NO: 666 - protein, 8 aa, synthetic construct
  REGION 1..8: note = Description of sequence: MC4R agonist
  MOD_RES 3: note = Homocysteine
  MOD_RES 5: note = d-Phenylalanine
  MOD_RES 8: note = Penicillamine
  REGION 3..8: note = cyclical region
  CROSSLNK 3..8: note = hCys-Pen bond
  MOD_RES 8: note = OH
HRCSFRWX

SEQ ID NO: 667 - protein, 7 aa, synthetic construct
  REGION 1..7: note = Description of sequence: MC4R agonist
  MOD_RES 1: note = d-Arginine
  MOD_RES 2: note = Homocysteine
  MOD_RES 4: note = d-Phenylalanine
  MOD_RES 7: note = Penicillamine
  REGION 2..7: note = cyclical region
  CROSSLNK 2..7: note = hCys-Pen bond
  MOD_RES <1: note = Acetylated
  MOD_RES 7: note = NH2
RCSFRWX

SEQ ID NO: 668 - protein, 8 aa, synthetic construct
  REGION 1..8: note = Description of sequence: MC4R agonist
  MOD_RES 2: note = d-Arginine
  MOD_RES 3: note = Homocysteine
  MOD_RES 5: note = d-Phenylalanine
  MOD_RES 8: note = Penicillamine
  REGION 3..8: note = cyclical region
  CROSSLNK 3..8: note = hCys-Pen bond
  MOD_RES 8: note = NH2
HRCSFRWX

SEQ ID NO: 669 - protein, 7 aa, synthetic construct
  REGION 1..7: note = Description of sequence: MC4R agonist
  MOD_RES 1: note = d-Arginine
  MOD_RES 2: note = Homocysteine
  MOD_RES 4: note = d-Phenylalanine
  MOD_RES 7: note = Penicillamine
  REGION 2..7: note = cyclical region
  CROSSLNK 2..7: note = hCys-Pen bond
  MOD_RES <1: note = Acetylated
  MOD_RES 7: note = OH
RCSFRWX

SEQ ID NO: 670 - protein, 8 aa, synthetic construct
  REGION 1..8: note = Description of sequence: MC4R agonist
  MOD_RES 2: note = d-Arginine
  MOD_RES 3: note = Homocysteine
  MOD_RES 5: note = d-Phenylalanine
  MOD_RES 8: note = Penicillamine
  REGION 3..8: note = cyclical region
  CROSSLNK 3..8: note = hCys-Pen bond
  MOD_RES 8: note = OH
HRCSFRWX

SEQ ID NO: 671 - protein, 7 aa, synthetic construct
  REGION 1..7: note = Description of sequence: MC4R agonist
  MOD_RES 2: note = Homocysteine
  MOD_RES 4: note = d-Phenylalanine
  MOD_RES 7: note = Penicillamine
  REGION 2..7: note = cyclical region
  CROSSLNK 2..7: note = hCys-Pen bond
  MOD_RES <1: note = Acetylated
  MOD_RES 7: note = NH2
KCSFRWX

SEQ ID NO: 672 - protein, 7 aa, synthetic construct
  REGION 1..7: note = Description of sequence: MC4R agonist
  MOD_RES 2: note = Homocysteine
  MOD_RES 4: note = d-Phenylalanine
  MOD_RES 7: note = Penicillamine
  REGION 2..7: note = cyclical region
  CROSSLNK 2..7: note = hCys-Pen bond
  MOD_RES <1: note = Acetylated
  MOD_RES 7: note = OH
KCSFRWX

SEQ ID NO: 673 - protein, 8 aa, synthetic construct
  REGION 1..8: note = Description of sequence: MC4R agonist
  MOD_RES 3: note = Homocysteine
  MOD_RES 5: note = d-Phenylalanine
  MOD_RES 8: note = Penicillamine
  REGION 3..8: note = cyclical region
  CROSSLNK 3..8: note = hCys-Pen bond
  MOD_RES 8: note = NH2
HKCSFRWX

SEQ ID NO: 674 - protein, 8 aa, synthetic construct
  REGION 1..8: note = Description of sequence: MC4R agonist
  MOD_RES 3: note = Homocysteine
  MOD_RES 5: note = d-Phenylalanine
  MOD_RES 8: note = Penicillamine
  REGION 3..8: note = cyclical region
  CROSSLNK 3..8: note = hCys-Pen bond
  MOD_RES 8: note = OH
HKCSFRWX

SEQ ID NO: 675 - protein, 7 aa, synthetic construct
  REGION 1..7: note = Description of sequence: MC4R agonist
  MOD_RES 1: note = d-Lysine
  MOD_RES 2: note = Homocysteine
  MOD_RES 4: note = d-Phenylalanine
  MOD_RES 7: note = Penicillamine
  REGION 2..7: note = cyclical region
  CROSSLNK 2..7: note = hCys-Pen bond
  MOD_RES <1: note = Acetylated
  MOD_RES 7: note = NH2
KCSFRWX

SEQ ID NO: 676 - protein, 8 aa, synthetic construct
  REGION 1..8: note = Description of sequence: MC4R agonist
  MOD_RES 2: note = d-Lysine
  MOD_RES 3: note = Homocysteine
  MOD_RES 5: note = d-Phenylalanine
  MOD_RES 8: note = Penicillamine
  REGION 3..8: note = cyclical region
  CROSSLNK 3..8: note = hCys-Pen bond
  MOD_RES 8: note = NH2
HKCSFRWX

SEQ ID NO: 677 - protein, 7 aa, synthetic construct
  REGION 1..7: note = Description of sequence: MC4R agonist
  MOD_RES 1: note = d-Lysine
  MOD_RES 2: note = Homocysteine
  MOD_RES 4: note = d-Phenylalanine
  MOD_RES 7: note = Penicillamine
  REGION 2..7: note = cyclical region
  CROSSLNK 2..7: note = hCys-Pen bond
  MOD_RES <1: note = Acetylated
  MOD_RES 7: note = OH
KCSFRWX

SEQ ID NO: 678 - protein, 8 aa, synthetic construct
  REGION 1..8: note = Description of sequence: MC4R agonist
  MOD_RES 2: note = d-Lysine
  MOD_RES 3: note = Homocysteine
  MOD_RES 5: note = d-Phenylalanine
  MOD_RES 8: note = Penicillamine
  REGION 3..8: note = cyclical region
  CROSSLNK 3..8: note = hCys-Pen bond
  MOD_RES 8: note = OH
HKCSFRWX

SEQ ID NO: 679 - protein, 7 aa, synthetic construct
  REGION 1..7: note = Description of sequence: MC4R agonist
  MOD_RES 2: note = Homocysteine
  MOD_RES 4: note = d-Phenylalanine
  MOD_RES 7: note = Penicillamine
  REGION 2..7: note = cyclical region
  CROSSLNK 2..7: note = hCys-Pen bond
  MOD_RES <1: note = Acetylated
  MOD_RES 7: note = OH
RCTFRWX

SEQ ID NO: 680 - protein, 8 aa, synthetic construct
  REGION 1..8: note = Description of sequence: MC4R agonist
  MOD_RES 3: note = Homocysteine
  MOD_RES 5: note = d-Phenylalanine
  MOD_RES 8: note = Penicillamine
  REGION 3..8: note = cyclical region
  CROSSLNK 3..8: note = hCys-Pen bond
  MOD_RES 8: note = NH2
HRCTFRWX

SEQ ID NO: 681 - protein, 8 aa, synthetic construct
  REGION 1..8: note = Description of sequence: MC4R agonist
  MOD_RES 3: note = Homocysteine
  MOD_RES 5: note = d-Phenylalanine
  MOD_RES 8: note = Penicillamine
  REGION 3..8: note = cyclical region
  CROSSLNK 3..8: note = hCys-Pen bond
  MOD_RES 8: note = OH
HRCTFRWX

SEQ ID NO: 682 - protein, 7 aa, synthetic construct
  REGION 1..7: note = Description of sequence: MC4R agonist
  MOD_RES 1: note = d-Arginine
  MOD_RES 2: note = Homocysteine
  MOD_RES 4: note = d-Phenylalanine
  MOD_RES 7: note = Penicillamine
  REGION 2..7: note = cyclical region
  CROSSLNK 2..7: note = hCys-Pen bond
  MOD_RES <1: note = Acetylated
  MOD_RES 7: note = NH2
RCTFRWX

SEQ ID NO: 683 - protein, 8 aa, synthetic construct
  REGION 1..8: note = Description of sequence: MC4R agonist
  MOD_RES 2: note = d-Arginine
  MOD_RES 3: note = Homocysteine
  MOD_RES 5: note = d-Phenylalanine
  MOD_RES 8: note = Penicillamine
  REGION 3..8: note = cyclical region
  CROSSLNK 3..8: note = hCys-Pen bond
  MOD_RES 8: note = NH2
HRCTFRWX

SEQ ID NO: 684 - protein, 7 aa, synthetic construct
  REGION 1..7: note = Description of sequence: MC4R agonist
  MOD_RES 1: note = d-Arginine
  MOD_RES 2: note = Homocysteine
  MOD_RES 4: note = d-Phenylalanine
  MOD_RES 7: note = Penicillamine
  REGION 2..7: note = cyclical region
  CROSSLNK 2..7: note = hCys-Pen bond
  MOD_RES <1: note = Acetylated
  MOD_RES 7: note = OH
RCTFRWX

SEQ ID NO: 685 - protein, 8 aa, synthetic construct
  REGION 1..8: note = Description of sequence: MC4R agonist
  MOD_RES 2: note = d-Arginine
  MOD_RES 3: note = Homocysteine
  MOD_RES 5: note = d-Phenylalanine
  MOD_RES 8: note = Penicillamine
  REGION 3..8: note = cyclical region
  CROSSLNK 3..8: note = hCys-Pen bond
  MOD_RES 8: note = OH
HRCTFRWX

SEQ ID NO: 686 - protein, 7 aa, synthetic construct
  REGION 1..7: note = Description of sequence: MC4R agonist
  MOD_RES 2: note = Homocysteine
  MOD_RES 4: note = d-Phenylalanine
  MOD_RES 7: note = Penicillamine
  REGION 2..7: note = cyclical region
  CROSSLNK 2..7: note = hCys-Pen bond
  MOD_RES <1: note = Acetylated
  MOD_RES 7: note = NH2
KCTFRWX

SEQ ID NO: 687 - protein, 7 aa, synthetic construct
  REGION 1..7: note = Description of sequence: MC4R agonist
  MOD_RES 2: note = Homocysteine
  MOD_RES 4: note = d-Phenylalanine
  MOD_RES 7: note = Penicillamine
  REGION 2..7: note = cyclical region
  CROSSLNK 2..7: note = hCys-Pen bond
  MOD_RES <1: note = Acetylated
  MOD_RES 7: note = OH
KCTFRWX

SEQ ID NO: 688 - protein, 8 aa, synthetic construct
  REGION 1..8: note = Description of sequence: MC4R agonist
  MOD_RES 3: note = Homocysteine
  MOD_RES 5: note = d-Phenylalanine
  MOD_RES 8: note = Penicillamine
  REGION 3..8: note = cyclical region
  CROSSLNK 3..8: note = hCys-Pen bond
  MOD_RES 8: note = NH2
HKCTFRWX

SEQ ID NO: 689 - protein, 8 aa, synthetic construct
  REGION 1..8: note = Description of sequence: MC4R agonist
  MOD_RES 3: note = Homocysteine
  MOD_RES 5: note = d-Phenylalanine
  MOD_RES 8: note = Penicillamine
  REGION 3..8: note = cyclical region
  CROSSLNK 3..8: note = hCys-Pen bond
  MOD_RES 8: note = OH
HKCTFRWX

SEQ ID NO: 690 - protein, 7 aa, synthetic construct
  REGION 1..7: note = Description of sequence: MC4R agonist
  MOD_RES 1: note = d-Lysine
  MOD_RES 2: note = Homocysteine
  MOD_RES 4: note = d-Phenylalanine
  MOD_RES 7: note = Penicillamine
  REGION 2..7: note = cyclical region
  CROSSLNK 2..7: note = hCys-Pen bond
  MOD_RES <1: note = Acetylated
  MOD_RES 7: note = NH2
KCTFRWX

SEQ ID NO: 691 - protein, 8 aa, synthetic construct
  REGION 1..8: note = Description of sequence: MC4R agonist
  MOD_RES 2: note = d-Lysine
  MOD_RES 3: note = Homocysteine
  MOD_RES 5: note = d-Phenylalanine
  MOD_RES 8: note = Penicillamine
  REGION 3..8: note = cyclical region
  CROSSLNK 3..8: note = hCys-Pen bond
  MOD_RES 8: note = NH2
HKCTFRWX

SEQ ID NO: 692 - protein, 7 aa, synthetic construct
  REGION 1..7: note = Description of sequence: MC4R agonist
  MOD_RES 1: note = d-Lysine
  MOD_RES 2: note = Homocysteine
  MOD_RES 4: note = d-Phenylalanine
  MOD_RES 7: note = Penicillamine
  REGION 2..7: note = cyclical region
  CROSSLNK 2..7: note = hCys-Pen bond
  MOD_RES <1: note = Acetylated
  MOD_RES 7: note = NH2
KCTFRWX

SEQ ID NO: 693 - protein, 8 aa, synthetic construct
  REGION 1..8: note = Description of sequence: MC4R agonist
  MOD_RES 2: note = d-Lysine
  MOD_RES 3: note = Homocysteine
  MOD_RES 5: note = d-Phenylalanine
  MOD_RES 8: note = Penicillamine
  REGION 3..8: note = cyclical region
  CROSSLNK 3..8: note = hCys-Pen bond
  MOD_RES 8: note = NH2
HKCTFRWX

1. A method of treating hypothalamic obesity in a subject comprising administering to the subject a melanocortin-4 receptor (MC4R) agonist, wherein the subject:
(i) has or is identified as having hypothalamic obesity;
(ii) has or is identifying as having damage to the brain tissue;
(iii) has or is identified as having a proliferative brain disease,
thereby treating hypothalamic obesity in the subject.

2. The method of claim 1, comprising (i).

3. The method of claim 1, comprising (ii).

4. The method of claim 1, comprising (iii).

5. The method of claim 1, wherein the hypothalamic obesity is caused by a neurodevelopmental abnormality or a brain malformation.

6. The method of claim 1, wherein the damage to the brain tissue is present in the hypothalamus.

7. The method of claim 6, wherein the damage to the brain tissue is present in the paraventricular hypothalamic nucleus, ventromedial hypothalamic nucleus, or arcuate hypothalamic nucleus.

8. The method of claim 7, wherein the damage or trauma in the brain occurs in the ventromedial nucleus.

9. The method of claim 1, wherein the subject has hypothalamic obesity.

10. The method of claim 1, wherein the proliferative brain disease comprises a benign tumor, a benign lesion, or a malignant tumor (e.g., cancer).

11. The method of claim 10, wherein the proliferative brain disease is present in the hypothalamus.

12. The method of claim 10, wherein the proliferative brain disease is present in the paraventricular hypothalamic nucleus, ventromedial hypothalamic nucleus, or arcuate hypothalamic nucleus.

13. The method of claim 10, wherein the proliferative brain disease comprises craniopharyngioma or astrocytoma.

14. The method of claim 1, wherein the subject has undergone a surgery (e.g., tumor removal or bariatric surgery) or received radiation.

15. The method of claim 1, wherein the subject is obese, e.g., severely obese.

16. The method of claim 1, wherein the subject is hyperphagic.

17. The method of claim 1, wherein the subject has a body mass index (BMI) greater than 35 kg/m² (e.g., ≥36, 37, 38, 39, 40, 41, 42, 43, 44, 45, 46, 47, 48, 49, 50 kg/m² or greater) prior to administration of the MC4R agonist, e.g., at the time the MC4R agonist is prescribed, or at the time of the first administration.

18. The method of claim 1, wherein the subject has a body mass index (BMI) greater than 40 kg/m² (e.g., ≥41, 42, 43, 44, 45, 46, 47, 48, 49, 50, 51, 52, 53, 54, 55 kg/m² or greater) prior to administration of the MC4R agonist, e.g., at the time the MC4R agonist is prescribed, or at the time of the first administration.

19. The method of claim 1, wherein the subject has failed one or more previous therapies, e.g., exercise, diet, or behavioral therapies, prior to administration of the MC4R agonist, e.g., at the time the MC4R agonist is prescribed, or at the time of the first administration.

20. The method of claim 1, wherein the subject has a lower body weight after administration of the MC4R agonist than before administration of the MC4R agonist.

21. The method of claim 1, wherein the MC4R agonist is has the structure of Formula (I): [chemical structure]
wherein:
A¹ is Acc, HN—(CH₂)ₘ—C(O), L- or D-amino acid, or deleted;
A² is Cys, D-Cys, hCys, D-hCys, Pen, D-Pen, Asp, or Glu;
A³ is Gly, Ala, β-Ala, Gaba, Aib, D-amino acid, or deleted;
A⁴ is His, 2-Pal, 3-Pal, 4-Pal, Taz, 2-Thi, 3-Thi, or (X¹, X², X³, X⁴, X⁵)Phe;
A⁵ is D-Phe, Phe, D-1-Nal, D-2-Nal, D-Trp, D-Bal, D-(X¹, X², X³, X⁴, X⁵)Phe, or D-(Et)Tyr;
A⁶ is Arg, hArg, Dab, Dap, Lys, Orn, or HN—CH((CH₂)ₙ—N(R⁴R⁵))—C(O);
A⁷ is Trp, 1-Nal, 2-Nal, Bal, Bip, D-Trp, D-2-Nal, D-Bal or D-Bip;
A⁸ is Gly, D-Ala, Acc, Ala, 13-Ala, Gaba, Apn, Ahx, Aha, HN—(CH₂)ₛ—C(O), or deleted;
A⁹ is Cys, D-Cys, hCys, D-hCys, Pen, D-Pen, Dab, Dap, Orn, or Lys;
A¹⁰ is Acc, HN—(CH₂)ₜ—C(O), L- or D-amino acid, or deleted;
R¹ is OH or NH₂;
each of R² and R³ is, independently for each occurrence, selected from the group consisting of H, (C₁-C₃₀)alkyl, (C₁-C₃₀)heteroalkyl, (C₁-C₃₀)acyl, (C₂-C₃₀)alkenyl, (C₂-C₃₀)alkynyl, aryl(C₁-C₃₀)alkyl, aryl(C₁-C₃₀)acyl, substituted (C₁-C₃₀)alkyl, substituted (C₁-C₃₀)heteroalkyl, substituted (C₁-C₃₀)acyl, substituted (C₂-C₃₀)alkenyl, substituted (C₂-C₃₀)alkynyl, substituted aryl(C₁-C₃₀)alkyl, and substituted aryl(C₁-C₃₀)acyl;
each of R⁴ and R⁵ is, independently for each occurrence, H, (C₁-C₄₀)alkyl, (C₁-C₄₀)heteroalkyl, (C₁-C₄₀)acyl, (C₂-C₄₀)alkenyl, (C₂-C₄₀)alkynyl, aryl(C₁-C₄₀)alkyl, aryl(C₁-C₄₀)acyl, substituted (C₁-C₄₀)alkyl, substituted (C₁-C₄₀)heteroalkyl, substituted (C₁-C₄₀)acyl, substituted (C₂-C₄₀)alkenyl, substituted (C₂-C₄₀)alkynyl, substituted aryl(C₁-C₄₀)alkyl, substituted aryl(C₁-C₄₀)acyl, (C₁-C₄₀)alkylsulfonyl, or —C(NH)—NH₂;
m is, independently for each occurrence, 1, 2, 3, 4, 5, 6 or 7;
n is, independently for each occurrence, 1, 2, 3, 4 or 5;
s is, independently for each occurrence, 1, 2, 3, 4, 5, 6, or 7;
t is, independently for each occurrence, 1, 2, 3, 4, 5, 6, or 7;
X¹, X², X³, X⁴, and X⁵ each is, independently for each occurrence, H, F, Cl, Br, I, (C₁-C₁₀)alkyl, substituted (C₁-C₁₀)alkyl, (C₂-C₁₀)alkenyl, substituted (C₂-C₁₀)alkenyl, (C₂-C₁₀)alkynyl, substituted (C₂-C₁₀)alkynyl, aryl, substituted aryl, OH, NH₂, NO₂, or CN.

22. The method of claim 21, wherein A¹ is selected from Lys, D-Lys, Arg, and D-Arg.

23. The method of claim 21, wherein A² and A⁹ are each independently selected from Cys, hCys, and Pen.

24. The method of claim 21, wherein A³ is selected from Ala or D-Ala.

25. The method of claim 21, wherein A⁴ is selected from His and D-His.

26. The method of claim 21, wherein A⁵ is selected from Phe, D-Phe, D-1-Nal, and D-2-Nal.

27. The method of claim 21, wherein A⁶ is Arg.

28. The method of claim 21, wherein A⁷ is Trp.

29. The method of claim 21, wherein A⁸ and/or A¹⁰ is deleted.

30. The method of claim 21, wherein R¹ is NH₂.

31. The method of claim 21, wherein one of R² and R³ is independently hydrogen and the other of R² and R³ is independently (C₁-C₃₀) acyl (e.g., acetyl).

32. The method of claim 1, wherein the MC4R agonist is Ac-Arg-c(Cys-D-Ala-His-D-Phe-Arg-Trp-Cys)-NH₂ (SEQ ID NO: 140).

33. The method of claim 1, wherein the MC4R agonist has the structure of Formula (II) or a pharmaceutically acceptable salt thereof: [chemical structure]
where Xxx is Asn, Gln, Ser, or Thr,
where A₁ is H or Ac,
where A₂ is OH or NH₂, and
where Yyy is Lys, Arg, D-Lys, or D-Arg.

34. The method of claim 33, wherein the MC4R agonist is selected from:
SEQ ID NO: 629)
Ac-Arg-c(hCys-Asn-D-Phe-Arg-Trp-Pen)-NH₂;
(SEQ ID NO: 630)
Ac-Arg-c(hCys-Gln-D-Phe-Arg-Trp-Pen)-NH₂;
(SEQ ID NO: 631)
Ac-Arg-c(hCys-Ser-D-Phe-Arg-Trp-Pen)-NH₂;
(SEQ ID NO: 632)
Ac-Arg-c(hCys-Thr-D-Phe-Arg-Trp-Pen)-NH₂;
(SEQ ID NO: 633)
Ac-Arg-c(Glu-Gln-D-Phe-Arg-Trp-Dpr)-NH₂;
(SEQ ID NO: 634)
Ac-Arg-c(hCys-Asn-D-Phe-Arg-Trp-Pen)-OH;
(SEQ ID NO: 635)
H-Arg-c(hCys-Asn-D-Phe-Arg-Trp-Pen)-NH₂;
(SEQ ID NO: 636)
H-Arg-c(hCys-Asn-D-Phe-Arg-Trp-Pen)-OH;
(SEQ ID NO: 637)
Ac-D-Arg-c(hCys-Asn-D-Phe-Arg-Trp-Pen)-NH₂;
(SEQ ID NO: 638)
H-D-Arg-c(hCys-Asn-D-Phe-Arg-Trp-Pen)-NH₂;
(SEQ ID NO: 639)
Ac-D-Arg-c(hCys-Asn-D-Phe-Arg-Trp-Pen)-OH;
(SEQ ID NO: 640)
H-D-Arg-c(hCys-Asn-D-Phe-Arg-Trp-Pen)-OH;
(SEQ ID NO: 641)
Ac-Lys-c(hCys-Asn-D-Phe-Arg-Trp-Pen)-NH₂;
(SEQ ID NO: 642)
Ac-Lys-c(hCys-Asn-D-Phe-Arg-Trp-Pen)-OH;
(SEQ ID NO: 643)
H-Lys-c(hCys-Asn-D-Phe-Arg-Trp-Pen)-NH₂;
(SEQ ID NO: 644)
H-Lys-c(hCys-Asn-D-Phe-Arg-Trp-Pen)-OH;
(SEQ ID NO: 645)
Ac-D-Lys-c(hCys-Asn-D-Phe-Arg-Trp-Pen)-NH₂;
(SEQ ID NO: 646)
H-D-Lys-c(hCys-Asn-D-Phe-Arg-Trp-Pen)-NH₂;
(SEQ ID NO: 647)
Ac-D-Lys-c(hCys-Asn-D-Phe-Arg-Trp-Pen)-OH;
(SEQ ID NO: 648)
H-D-Lys-c(hCys-Asn-D-Phe-Arg-Trp-Pen)-OH;
(SEQ ID NO: 649)
Ac-Arg-c(hCys-Gln-D-Phe-Arg-Trp-Pen)-OH;
(SEQ ID NO: 650)
H-Arg-c(hCys-Gln-D-Phe-Arg-Trp-Pen)-NH₂;
(SEQ ID NO: 651)
H-Arg-c(hCys-Gln-D-Phe-Arg-Trp-Pen)-OH;
(SEQ ID NO: 652)
Ac-D-Arg-c(hCys-Gln-D-Phe-Arg-Trp-Pen)-NH₂;
(SEQ ID NO: 653)
H-D-Arg-c(hCys-Gln-D-Phe-Arg-Trp-Pen)-NH₂;
(SEQ ID NO: 654)
Ac-D-Arg-c(hCys-Gln-D-Phe-Arg-Trp-Pen)-OH;
(SEQ ID NO: 655)
H-D-Arg-c(hCys-Gln-D-Phe-Arg-Trp-Pen)-OH;
(SEQ ID NO: 656)
Ac-Lys-c(hCys-Gln-D-Phe-Arg-Trp-Pen)-NH₂;
(SEQ ID NO: 657)
Ac-Lys-c(hCys-Gln-D-Phe-Arg-Trp-Pen)-OH;
(SEQ ID NO: 658)
H-Lys-c(hCys-Gln-D-Phe-Arg-Trp-Pen)-NH₂;
(SEQ ID NO: 659)
H-Lys-c(hCys-Gln-D-Phe-Arg-Trp-Pen)-OH;
(SEQ ID NO: 660)
Ac-D-Lys-c(hCys-Gln-D-Phe-Arg-Trp-Pen)-NH₂;
(SEQ ID NO: 661)
H-D-Lys-c(hCys-Gln-D-Phe-Arg-Trp-Pen)-NH₂;
(SEQ ID NO: 662)
Ac-D-Lys-c(hCys-Gln-D-Phe-Arg-Trp-Pen)-OH;
(SEQ ID NO: 663)
H-D-Lys-c(hCys-Gln-D-Phe-Arg-Trp-Pen)-OH;
(SEQ ID NO: 664)
Ac-Arg-c(hCys-Ser-D-Phe-Arg-Trp-Pen)-OH;
(SEQ ID NO: 665)
H-Arg-c(hCys-Ser-D-Phe-Arg-Trp-Pen)-NH₂;
(SEQ ID NO: 666)
H-Arg-c(hCys-Ser-D-Phe-Arg-Trp-Pen)-OH;
(SEQ ID NO: 667)
Ac-D-Arg-c(hCys-Ser-D-Phe-Arg-Trp-Pen)-NH₂;
(SEQ ID NO: 668)
H-D-Arg-c(hCys-Ser-D-Phe-Arg-Trp-Pen)-NH₂;
(SEQ ID NO: 669)
Ac-D-Arg-c(hCys-Ser-D-Phe-Arg-Trp-Pen)-OH;
(SEQ ID NO: 670)
H-D-Arg-c(hCys-Ser-D-Phe-Arg-Trp-Pen)-OH;
(SEQ ID NO: 671)
Ac-Lys-c(hCys-Ser-D-Phe-Arg-Trp-Pen)-NH₂;
(SEQ ID NO: 672)
Ac-Lys-c(hCys-Ser-D-Phe-Arg-Trp-Pen)-OH;
(SEQ ID NO: 673)
H-Lys-c(hCys-Ser-D-Phe-Arg-Trp-Pen)-NH₂;
(SEQ ID NO: 674)
H-Lys-c(hCys-Ser-D-Phe-Arg-Trp-Pen)-OH;
(SEQ ID NO: 675)
Ac-D-Lys-c(hCys-Ser-D-Phe-Arg-Trp-Pen)-NH₂;
(SEQ ID NO: 676)
H-D-Lys-c(hCys-Ser-D-Phe-Arg-Trp-Pen)-NH₂;
(SEQ ID NO: 677)
Ac-D-Lys-c(hCys-Ser-D-Phe-Arg-Trp-Pen)-OH;
(SEQ ID NO: 678)
H-D-Lys-c(hCys-Ser-D-Phe-Arg-Trp-Pen)-OH;
(SEQ ID NO: 679)
Ac-Arg-c(hCys-Thr-D-Phe-Arg-Trp-Pen)-OH;
(SEQ ID NO: 680)
H-Arg-c(hCys-Thr-D-Phe-Arg-Trp-Pen)-NH₂;
(SEQ ID NO: 681)
H-Arg-c(hCys-Thr-D-Phe-Arg-Trp-Pen)-OH;
(SEQ ID NO: 682)
Ac-D-Arg-c(hCys-Thr-D-Phe-Arg-Trp-Pen)-NH₂;
(SEQ ID NO: 683)
H-D-Arg-c(hCys-Thr-D-Phe-Arg-Trp-Pen)-NH₂;
(SEQ ID NO: 684)
Ac-D-Arg-c(hCys-Thr-D-Phe-Arg-Trp-Pen)-OH;
(SEQ ID NO: 685)
H-D-Arg-c(hCys-Thr-D-Phe-Arg-Trp-Pen)-OH;
(SEQ ID NO: 686)
Ac-Lys-c(hCys-Thr-D-Phe-Arg-Trp-Pen)-NH₂;
(SEQ ID NO: 687)
Ac-Lys-c(hCys-Thr-D-Phe-Arg-Trp-Pen)-OH;
(SEQ ID NO: 688)
H-Lys-c(hCys-Thr-D-Phe-Arg-Trp-Pen)-NH₂;
(SEQ ID NO: 689)
H-Lys-c(hCys-Thr-D-Phe-Arg-Trp-Pen)-OH;
(SEQ ID NO: 690)
Ac-D-Lys-c(hCys-Thr-D-Phe-Arg-Trp-Pen)-NH₂;
(SEQ ID NO: 691)
H-D-Lys-c(hCys-Thr-D-Phe-Arg-Trp-Pen)-NH₂;
(SEQ ID NO: 692)
Ac-D-Lys-c(hCys-Thr-D-Phe-Arg-Trp-Pen)-NH₂;
and
(SEQ ID NO: 693)
H-D-Lys-c(hCys-Thr-D-Phe-Arg-Trp-Pen)-NH₂,
or a pharmaceutically acceptable salt thereof.

35. The method of claim 1, wherein the MC4R agonist is formulated as a pharmaceutical composition.

36. The method of claim 35, wherein the pharmaceutical composition further comprises a pharmaceutically acceptable excipient.

37. The method of claim 35, wherein the pharmaceutical composition comprises a polyethylene glycol (e.g., a modified polyethylene glycol, e.g., mPEG-DSPE, e.g., mPEG-2,000-DSPE).

38. The method of claim 1, comprising administering the MC4R agonist in a unit dosage suitable for injection, e.g., subcutaneous injection, to the subject.

39. The method of claim 38, wherein the unit dosage form is disposed within a delivery device, e.g., a syringe (e.g., prefilled syringe), an implantable device, a needleless hypodermic injection device, an infusion pump (e.g., implantable infusion pump), or an osmotic delivery system.

40. The method of claim 39, wherein the MC4R agonist is administered subcutaneously, e.g., by subcutaneous injection.

41. The method of claim 1, wherein the subject is a human.

42. The method of claim 1, wherein the subject is an adult (e.g., over the age of 18 years old).

43. The method of claim 1, wherein the subject is a pediatric subject, e.g., a child (e.g., under the age of 18, 16, 14, 12, 10, 8, 6, or 4 years).

44. The method of claim 1, wherein prior to administration of the MC4R agonist, the subject has previously received treatment for obesity, e.g., a non-genetic obesity, e.g., hypothalamic obesity.

45. The method of claim 1, wherein after a first administration of the MC4R agonist (e.g., at least 2 weeks, 4 weeks, 6 weeks, 8 weeks, 10 weeks, 12 weeks, 4 months, 5 months, 6 months, 8 months, 10 months, 1 year, or longer), the subject exhibits a reduction in BMI.

46. The method of claim 45, wherein the reduction of BMI in the subject is greater than 0.5%, 1%, 1.5%, 2%, 2.5%, 3%, 3.5%, 4%, 4.5% 5%, 6%, 7%, 8%, 9%, 10%1, 12%, 14% 16%, 18%, 20%, or more, e.g., relative to a reference standard (e.g., BMI prior to administration of the MC4R agonist).

47. The method of claim 45, wherein the reduction of BMI in the subject is greater than 0.5%, e.g., relative to a reference standard (e.g., BMI prior to administration of the MC4R agonist).

48. The method of claim 45, wherein the reduction of BMI in the subject is greater than 5%, e.g., relative to a reference standard (e.g., BMI prior to administration of the MC4R agonist).

49. The method of claim 45, wherein the reduction of BMI in the subject is greater than 10%, e.g., relative to a reference standard (e.g., BMI prior to administration of the MC4R agonist).

50. The method of claim 45, wherein the reduction of BMI in the subject is between 1%-10% (e.g., 1-5%, or 5-10%), e.g., relative to a reference standard (e.g., BMI prior to administration of the MC4R agonist).

51. The method of claim 45, wherein the reduction of BMI in the subject occurs between 8 weeks and 6 months after administration of the MC4R agonist.

52. The method of claim 1, wherein the subject is administered an additional agent (e.g., an additional therapeutic agent).

53. The method of claim 1, wherein the MC4R agonist is a compound of Formula (I-a): [chemical structure]
or a pharmaceutically acceptable salt thereof, wherein:
A¹ is Phe, D-Phe, or Nle;
A² is Cys;
A³ is deleted;
A⁴ is His;
A⁵ is D-Phe or D-(Et)Tyr;
A⁶ is Arg or hArg;
A⁷ is Trp or Bip;
A⁸ is Ala, β-Ala, Gaba, or Apn;
A⁹ is D-Cys; and
A¹⁰ is Thr or deleted.

54. The method of claim 53, wherein the MC4R agonist of Formula (I-a) is selected from:
(SEQ ID NO: 4)
D-Phe-c(Cys-His-D-Phe-Arg-Trp-Ala-D-Cys)-Thr-NH₂;
(SEQ ID NO: 5)
D-Phe-c(Cys-His-D-Phe-Arg-Trp-β-Ala-D-Cys)-Thr-NH₂;
(SEQ ID NO: 6)
D-Phe-c(Cys-His-D-Phe-Arg-Trp-Gaba-D-Cys)-Thr-NH₂;
(SEQ ID NO: 79)
D-Phe-c(Cys-His-D-Phe-hArg-Trp-β-Ala-D-Cys)-Thr-NH₂;
(SEQ ID NO: 80)
D-Phe-c(Cys-His-D-(Et)Tyr-Arg-Trp-β-Ala-D-Cys)-Thr-NH₂;
(SEQ ID NO: 81)
D-Phe-c(Cys-His-D-Phe-Arg-Bip-B-Ala-D-Cys)-Thr-NH₂;
(SEQ ID NO: 82)
D-Phe-c(Cys-His-D-(Et)Tyr-hArg-Trp-β-Ala-D-Cys)-Thr-NH₂;
(SEQ ID NO: 83)
D-Phe-c(Cys-His-D-Phe-hArg-Bip-β-Ala-D-Cys)-Thr-NH₂;
(SEQ ID NO: 84)
D-Phe-c(Cys-His-D-(Et)Tyr-hArg-Bip-β-Ala-D-Cys)-Thr-NNH₂;
(SEQ ID NO: 85)
Nle-c(Cys-His-D-Phe-Arg-Trp-Apn-Cys)-NH₂;
and
(SEQ ID NO: 105)
Phe-c(Cys-His-D-Phe-Arg-Trp-Gaba-Cys)-NH₂.

55. The method of claim 1, wherein the MC4R agonist is a compound of Formula (I-b): [chemical structure]
or a pharmaceutically acceptable salt thereof, wherein:
A¹ is Nle, A6c, D-2-Nal, Cha, Oic, Chg, hCha, D-Cha, D-hCha, Nip, hPro, hLeu, Phe, D-Phe, D-Chg, hPhe, β-hMet, Gaba, Leu, Ile, Val, 2-Nal, Arg or D-Arg;
A² is Asp, Cys, D-Cys, or Pen;
A³ is D-Ala, β-Ala, Gaba, Aib, Gly, Ala, D-Glu, D-Abu, D-Val, D-Tle, D-Leu, D-Tle, D-Cha, deleted;
A⁴ His or 3-Pal;
A⁵ is Phe, D-Phe, or D-2-Nal;
A⁶ is Arg;
A⁷ is Trp, 1-Nal, 2-Nal, Bal, or D-Trp;
A⁸ is β-Ala, A6c, Ahx, Apn, Gaba, Ala, Aha, D-Ala or deleted;
A⁹ is Lys, Cys, D-Cys, or Pen;
A¹⁰ is deleted.
wherein A² and A⁹ are pairwise selected to form a disulfide or lactam bridge.

56. The method of claim 55, wherein the MC4R agonist of Formula (I-b) is selected from:
(SEQ ID NO: 1)
Ac-Nle-c(Asp-His-D-Phe-Arg-Trp-β-Ala-Lys)-NH₂;
(SEQ ID NO: 2)
Ac-Nle-c(Asp-His-D-Phe-Arg-Trp-A6c-Lys)-NH₂;
(SEQ ID NO: 3)
Ac-Nle-c(Cys-His-D-Phe-Arg-Trp-Ahx-Cys)-NH₂;
(SEQ ID NO: 7)
Ac-Nle-c(Cys-His-D-Phe-Arg-Trp-Apn-Cys)-NH₂;
(SEQ ID NO: 8)
Ac-Nle-c(Asp-His-D-Phe-Arg-Trp-Apn-Lys)-NH₂;
(SEQ ID NO: 9)
Ac-A6c-c(Asp-His-D-Phe-Arg-Trp-Gaba-Lys)-NH₂;
(SEQ ID NO: 10)
Ac-D-2-Nal-c(Asp-His-D-Phe-Arg-Trp-Gaba-Lys)-NH₂;
(SEQ ID NO: 11)
Ac-Cha-c(Asp-His-D-Phe-Arg-Trp-Gaba-Lys)-NH₂;
(SEQ ID NO: 12)
Ac-Nle-c(Asp-His-D-Phe-Arg-Trp-Gaba-Lys)-NH₂;
(SEQ ID NO: 13)
Ac-Nle-c(Cys-D-Ala-His-D-Phe-Arg-Trp-Cys)-NH₂;
(SEQ ID NO: 14)
Ac-Nle-c(Cys-β-Ala-His-D-Phe-Arg-Trp-Cys)-NH₂;
(SEQ ID NO: 15)
Ac-Nle-c(Cys-Gaba-His-D-Phe-Arg-Trp-Cys)-NH₂;
(SEQ ID NO: 16)
Ac-Nle-c(Cys-Aib-His-D-Phe-Arg-Trp-Cys)-NH₂;
(SEQ ID NO: 17)
Ac-Nle-c(Cys-Gly-His-D-Phe-Arg-Trp-Cys)-NH₂;
(SEQ ID NO: 18)
Ac-Nle-c(D-Cys-Ala-His-D-Phe-Arg-Trp-Cys)-NH₂;
(SEQ ID NO: 19)
Ac-Nle-c(D-Cys-D-Ala-His-D-Phe-Arg-Trp-Cys)-NH₂;
(SEQ ID NO: 20)
Ac-Nle-c(D-Cys-β-Ala-His-D-Phe-Arg-Trp-Cys)-NH₂;
(SEQ ID NO: 21)
Ac-Nle-c(D-Cys-Gaba-His-D-Phe-Arg-Trp-Cys)-NH₂;
(SEQ ID NO: 22)
Ac-Nle-c(D-Cys-Aib-His-D-Phe-Arg-Trp-Cys)-NH₂;
(SEQ ID NO: 23)
Ac-Nle-c(D-Cys-Gly-His-D-Phe-Arg-Trp-Cys)-NH₂;
(SEQ ID NO: 24)
Ac-Nle-c(Cys-D-Ala-His-D-Phe-Arg-Trp-D-Cys)-NH₂;
(SEQ ID NO: 25)
Ac-Nle-c(Cys-β-Ala-His-D-Phe-Arg-Trp-D-Cys)-NH₂;
(SEQ ID NO: 26)
Ac-Nle-c(Cys-Gaba-His-D-Phe-Arg-Trp-D-Cys)-NH₂;
(SEQ ID NO: 27)
Ac-Nle-c(Cys-Aib-His-D-Phe-Arg-Trp-D-Cys)-NH₂;
(SEQ ID NO: 28)
Ac-Nle-c(Cys-Gly-His-D-Phe-Arg-Trp-D-Cys)-NH₂;
(SEQ ID NO: 29)
Ac-Nle-c(D-Cys-Ala-His-D-Phe-Arg-Trp-D-Cys)-NH₂;
(SEQ ID NO: 30)
Ac-Nle-c(D-Cys-D-Ala-His-D-Phe-Arg-Trp-D-Cys)-NH₂;
(SEQ ID NO: 31)
Ac-Nle-c(D-Cys-β-Ala-His-D-Phe-Arg-Trp-D-Cys)-NH₂;
(SEQ ID NO: 32)
Ac-Nle-c(D-Cys-Gaba-His-D-Phe-Arg-Trp-D-Cys)-NH₂;
(SEQ ID NO: 33)
Ac-Nle-c(D-Cys-Aib-His-D-Phe-Arg-Trp-D-Cys)-NH₂;
(SEQ ID NO: 34)
Ac-Oic-c(Asp-His-D-Phe-Arg-Trp-Gaba-Lys)-NH₂;
(SEQ ID NO: 35)
Ac-Chg-c(Asp-His-D-Phe-Arg-Trp-Gaba-Lys)-NH₂;
(SEQ ID NO: 36)
Ac-hCha-c(Asp-His-D-Phe-Arg-Trp-Gaba-Lys)-NH₂;
(SEQ ID NO: 37)
Ac-D-Cha-c(Asp-His-D-Phe-Arg-Trp-Gaba-Lys)-NH₂;
(SEQ ID NO: 38)
Ac-D-hCha-c(Asp-His-D-Phe-Arg-Trp-Gaba-Lys)-NH₂;
(SEQ ID NO: 39)
Ac-Nip-c(Asp-His-D-Phe-Arg-Trp-Gaba-Lys)-NH₂;
(SEQ ID NO: 40)
Ac-hPro-c(Asp-His-D-Phe-Arg-Trp-Gaba-Lys)-NH₂;
(SEQ ID NO: 41)
Ac-hLeu-c(Asp-His-D-Phe-Arg-Trp-Gaba-Lys)-NH₂;
(SEQ ID NO: 42)
Ac-Phe-c(Asp-His-D-Phe-Arg-Trp-Gaba-Lys)-NH₂;
(SEQ ID NO: 43)
Ac-D-Phe-c(Asp-His-D-Phe-Arg-Trp-Gaba-Lys)-NH₂;
(SEQ ID NO: 44)
Ac-D-Chg-c(Asp-His-D-Phe-Arg-Trp-Gaba-Lys)-NH₂;
(SEQ ID NO: 47)
Ac-hPhe-c(Asp-His-D-Phe-Arg-Trp-Gaba-Lys)-NH₂;
(SEQ ID NO: 48)
Ac-β-hMet-c(Asp-His-D-Phe-Arg-Trp-Gaba-Lys)-NH₂;
(SEQ ID NO: 49)
Ac-Gaba-c(Asp-His-D-Phe-Arg-Trp-Gaba-Lys)-NH₂;
(SEQ ID NO: 50)
Ac-Cha-c(Asp-His-D-Phe-Arg-D-Trp-Ala-Lys)-NH₂;
(SEQ ID NO: 51)
Ac-hCha-c(Asp-His-D-Phe-Arg-D-Trp-Ala-Lys)-NH₂;
(SEQ ID NO: 52)
Ac-Leu-c(Asp-His-D-Phe-Arg-D-Trp-Ala-Lys)-NH₂;
(SEQ ID NO: 53)
Ac-hLeu-c(Asp-His-D-Phe-Arg-D-Trp-Ala-Lys)-NH₂;
(SEQ ID NO: 54)
Ac-Phe-c(Asp-His-D-Phe-Arg-D-Trp-Ala-Lys)-NH₂;
(SEQ ID NO: 55)
Ac-Nle-c(Asp-His-D-Phe-Arg-D-Trp-D-Ala-Lys)-NH₂;
(SEQ ID NO: 56)
Ac-Nle-c(Asp-His-D-Phe-Arg-D-Trp-β-Ala-Lys)-NH₂;
(SEQ ID NO: 57)
Ac-Nle-c(Asp-His-D-Phe-Arg-D-Trp-Gaba-Lys)-NH₂;
(SEQ ID NO: 58)
Ac-Nle-c(Asp-His-D-Phe-Arg-D-Trp-Aha-Lys)-NH₂;
(SEQ ID NO: 59)
Ac-Nle-c(Asp-His-D-Phe-Arg-D-Trp-Apn-Lys)-NH₂;
(SEQ ID NO: 60)
Ac-Nle-c(Cys-His-D-Phe-Arg-D-Trp-Apn-Cys)-NH₂;
(SEQ ID NO: 61)
Ac-Nle-c(Cys-His-D-Phe-Arg-D-Trp-Gaba-Cys)-NH₂;
(SEQ ID NO: 62)
Ac-Nle-c(Cys-His-D-Phe-Arg-D-Trp-Ahx-Cys)-NH₂;
(SEQ ID NO: 63)
Ac-Nle-c(Cys-His-D-Phe-Arg-D-Trp-β-Ala-Cys)-NH₂;
(SEQ ID NO: 64)
Ac-Nle-c(Cys-His-D-Phe-Arg-D-Trp-D-Ala-Cys)-NH₂;
(SEQ ID NO: 65)
Ac-Nle-c(Cys-D-Ala-His-D-2-Nal-Arg-Trp-Cys)-NH₂;
(SEQ ID NO: 66)
Ac-Nle-c(Cys-D-Ala-His-D-2-Nal-Arg-2-Nal-Cys)-NH₂;
(SEQ ID NO: 67)
Ac-Nle-c(Cys-D-Ala-His-D-2-Nal-Arg-1-Nal-Cys)-NH₂;
(SEQ ID NO: 70)
Ac-Nle-c(Cys-D-Ala-His-D-Phe-Arg-2-Nal-Cys)-NH₂;
(SEQ ID NO: 71)
Ac-Nle-c(Cys-D-Ala-His-D-Phe-Arg-1-Nal-Cys)-NH₂;
(SEQ ID NO: 72)
Ac-Nle-c(Cys-D-Ala-His-D-Phe-Arg-Bal-Cys)-NH₂;
(SEQ ID NO: 73)
Ac-Nle-c(Cys-D-Glu-His-D-Phe-Arg-Trp-Cys)-NH₂;
(SEQ ID NO: 74)
Ac-Nle-c(Asp-His-D-Phe-Arg-Trp-D-Ala-Lys)-NH₂;
(SEQ ID NO: 75)
Ac-Nle-c(Cys-D-Ala-His-D-2-Nal-Arg-Bal-Cys)-NH₂;
(SEQ ID NO: 76)
Ac-Nle-c(Pen-D-Ala-His-D-Phe-Arg-Trp-Cys)-NH₂;
(SEQ ID NO: 77)
Ac-Nle-c(Cys-D-Ala-His-D-Phe-Arg-Trp-Pen)-NH₂;
(SEQ ID NO: 78)
Ac-Nle-c(Pen-D-Ala-His-D-Phe-Arg-Trp-Pen)-NH₂;
(SEQ ID NO: 86)
Ac-Nle-c(Asp-D-Ala-His-D-Phe-Arg-Trp-Lys)-NH₂;
(SEQ ID NO: 87)
Ac-Nle-c(Asp-D-Ala-His-D-Phe-Arg-Bal-Lys)-NH₂;
(SEQ ID NO: 89)
Ac-Nle-c(Cys-D-Abu-His-D-Phe-Arg-Trp-Cys)-NH₂;
(SEQ ID NO: 90)
Ac-Nle-c(Cys-D-Val-His-D-Phe-Arg-Trp-Cys)-NH₂;
(SEQ ID NO: 91)
Ac-Nle-c(Cys-D-Ile-His-D-Phe-Arg-Trp-Cys)-NH₂;
(SEQ ID NO: 92)
Ac-Nle-c(Cys-D-Leu-His-D-Phe-Arg-Trp-Cys)-NH₂;
(SEQ ID NO: 93)
Ac-Nle-c(Cys-D-Tle-His-D-Phe-Arg-Trp-Cys)-NH₂;
(SEQ ID NO: 94)
Ac-Nle-c(Cys-D-Cha-His-D-Phe-Arg-Trp-Cys)-NH₂;
(SEQ ID NO: 95)
Ac-Nle-c(Pen-His-D-Phe-Arg-Trp-Gaba-Cys)-NH₂;
(SEQ ID NO: 96)
Ac-Nle-c(Cys-His-D-Phe-Arg-Trp-Gaba-Pen)-NH₂;
(SEQ ID NO: 97)
Ac-Nle-c(Pen-His-D-Phe-Arg-Trp-Gaba-Pen)-NH₂;
(SEQ ID NO: 98)
Ac-Leu-c(Cys-His-D-Phe-Arg-Trp-Gaba-Cys)-NH₂;
(SEQ ID NO: 99)
Ac-Cha-c(Cys-His-D-Phe-Arg-Trp-Gaba-Cys)-NH₂;
(SEQ ID NO: 100)
Ac-Ile-c(Cys-His-D-Phe-Arg-Trp-Gaba-Cys)-NH₂;
(SEQ ID NO: 101)
Ac-Phe-c(Cys-His-D-Phe-Arg-Trp-Gaba-Cys)-NH₂;
(SEQ ID NO: 102)
Ac-Val-c(Cys-His-D-Phe-Arg-Trp-Gaba-Cys)-NH₂;
(SEQ ID NO: 103)
Ac-2-Nal-c(Cys-His-D-Phe-Arg-Trp-Gaba-Cys)-NH₂;
(SEQ ID NO: 106)
Ac-Nle-c(Cys-3-Pal-D-Phe-Arg-Trp-Gaba-Cys)-NH₂;
(SEQ ID NO: 108)
Ac-Nle-c(Cys-His-Phe-Arg-D-Trp-Gaba-Cys)-NH₂;
(SEQ ID NO: 109)
Ac-Nle-c(Asp-His-D-2-Nal-Arg-Trp-Ala-Lys)-NH₂;
(SEQ ID NO: 110)
Ac-Nle-c(Asp-His-D-2-Nal-Arg-Trp-β-Ala-Lys)-NH₂;
(SEQ ID NO: 111)
Ac-Nle-c(Cys-His-D-2-Nal-Arg-Trp-Gaba-Cys)-NH₂;
(SEQ ID NO: 112)
Ac-Nle-c(Cys-His-D-2-Nal-Arg-Trp-Ahx-Cys)-NH₂;
(SEQ ID NO: 113)
Ac-hPhe-c(Asp-His-D-2-Nal-Arg-Trp-Gaba-Lys)-NH₂;
(SEQ ID NO: 114)
Ac-Cha-c(Asp-His-D-2-Nal-Arg-Trp-Gaba-Lys)-NH₂;
(SEQ ID NO: 139)
Ac-Arg-c(Cys-D-Ala-His-D-2-Nal-Arg-Trp-Cys)-NH₂;
(SEQ ID NO: 140)
Ac-Arg-c(Cys-D-Ala-His-D-Phe-Arg-Trp-Cys)-NH₂;
(SEQ ID NO: 141)
Ac-D-Arg-c(Cys-D-Ala-His-D-Phe-Arg-Trp-Cys)-NH₂;
(SEQ ID NO: 142)
Ac-D-Arg-c(Cys-D-Ala-His-D-Phe-Arg-Trp-Pen)-NH₂;
(SEQ ID NO: 143)
Ac-D-Arg-c(Cys-His-D-Phe-Arg-Trp-Gaba-Pen)-NH₂;
(SEQ ID NO: 144)
Ac-Arg-c(Cys-His-D-Phe-Arg-Trp-Gaba-Pen)-NH₂;
(SEQ ID NO: 145)
Ac-Arg-c(Cys-D-Ala-His-D-Phe-Arg-Trp-Pen)-NH₂;
(SEQ ID NO: 146)
Ac-D-Arg-c(Asp-His-D-Phe-Arg-Trp-Ala-Lys)-NH₂;
and
(SEQ ID NO: 147)
Ac-Arg-c(Asp-His-D-Phe-Arg-Trp-Ala-Lys)-NH₂.

57. The method of claim 1, wherein the MC4R agonist is a compound of Formula (XII-a): [chemical structure]
or a pharmaceutically acceptable salt thereof, wherein:
Aaa and Bbb are selected from Cys, hCys, Pen capable of establishing a disulfide bridge; or
Glu, Asp, Lys, Orn, Dpr, Dbu capable of establishing a lactam bridge;
Xxx is Asn, Gln, Ser, Thr; and
Yyy is Lys, Arg, D-Lys, D-Arg.

58. The method claim 57, wherein the MC4R agonist of Formula (XII-a) is selected from:
(SEQ ID NO: 635)
H-Arg-c(hCys-Asn-D-Phe-Arg-Trp-Pen)-NH₂;
(SEQ ID NO: 643)
H-Lys-c(hCys-Asn-D-Phe-Arg-Trp-Pen)-NH₂;
(SEQ ID NO: 646)
H-D-Lys-c(hCys-Asn-D-Phe-Arg-Trp-Pen)-NH₂;
(SEQ ID NO: 650)
H-Arg-c(hCys-Gln-D-Phe-Arg-Trp-Pen)-NH₂;
(SEQ ID NO: 653)
H-D-Arg-c(hCys-Gln-D-Phe-Arg-Trp-Pen)-NH₂;
(SEQ ID NO: 658)
H-Lys-c(hCys-Gln-D-Phe-Arg-Trp-Pen)-NH₂;
(SEQ ID NO: 661)
H-D-Lys-c(hCys-Gln-D-Phe-Arg-Trp-Pen)-NH₂;
(SEQ ID NO: 665)
H-Arg-c(hCys-Ser-D-Phe-Arg-Trp-Pen)-NH₂;
(SEQ ID NO: 668)
H-D-Arg-c(hCys-Ser-D-Phe-Arg-Trp-Pen)-NH₂;
(SEQ ID NO: 673)
H-Lys-c(hCys-Ser-D-Phe-Arg-Trp-Pen)-NH₂;
(SEQ ID NO: 676)
H-D-Lys-c(hCys-Ser-D-Phe-Arg-Trp-Pen)-NH₂;
(SEQ ID NO: 680)
H-Arg-c(hCys-Thr-D-Phe-Arg-Trp-Pen)-NH₂;
(SEQ ID NO: 683)
H-D-Arg-c(hCys-Thr-D-Phe-Arg-Trp-Pen)-NH₂;
(SEQ ID NO: 688)
H-Lys-c(hCys-Thr-D-Phe-Arg-Trp-Pen)-NH₂;
(SEQ ID NO: 691)
H-D-Lys-c(hCys-Thr-D-Phe-Arg-Trp-Pen)-NH₂;
and
(SEQ ID NO: 693)
H-D-Lys-c(hCys-Thr-D-Phe-Arg-Trp-Pen)-NH₂.

59. The method of claim 1, wherein the MC4R agonist is a compound of Formula (XII-b): [chemical structure]
or a pharmaceutically acceptable salt thereof, wherein:
Aaa and Bbb are selected from Cys, hCys, Pen capable of establishing a disulfide bridge; or Glu, Asp, Lys, Orn, Dpr, Dbu capable of establishing a lactam bridge;
Xxx is Asn, Gln, Ser, Thr; and
Yyy is Lys, Arg, D-Lys, D-Arg.

60. The method of claim 59, wherein the MC4R agonist of Formula (XII-b) is selected from:
(SEQ ID NO: 629)
Ac-Arg-c(hCys-Asn-D-Phe-Arg-Trp-Pen)-NH₂;
(SEQ ID NO: 630)
Ac-Arg-c(hCys-Gln-D-Phe-Arg-Trp-Pen)-NH₂;
(SEQ ID NO: 631)
Ac-Arg-c(hCys-Ser-D-Phe-Arg-Trp-Pen)-NH₂;
(SEQ ID NO: 632)
Ac-Arg-c(hCys-Thr-D-Phe-Arg-Trp-Pen)-NH₂;
(SEQ ID NO: 633)
Ac-Arg-c(Glu-Gln-D-Phe-Arg-Trp-Dpr)-NH₂;
(SEQ ID NO: 637
Ac-D-Arg-c(hCys-Asn-D-Phe-Arg-Trp-Pen)-NH₂;
(SEQ ID NO: 641)
Ac-Lys-c(hCys-Asn-D-Phe-Arg-Trp-Pen)-NH₂;
(SEQ ID NO: 645)
Ac-D-Lys-c(hCys-Asn-D-Phe-Arg-Trp-Pen)-NH₂;
(SEQ ID NO: 652)
Ac-D-Arg-c(hCys-Gln-D-Phe-Arg-Trp-Pen)-NH₂;
(SEQ ID NO: 656)
Ac-Lys-c(hCys-Gln-D-Phe-Arg-Trp-Pen)-NH₂;
(SEQ ID NO: 660)
Ac-D-Lys-c(hCys-Gln-D-Phe-Arg-Trp-Pen)-NH₂;
(SEQ ID NO: 667)
Ac-D-Arg-c(hCys-Ser-D-Phe-Arg-Trp-Pen)-NH₂;
(SEQ ID NO: 671)
Ac-Lys-c(hCys-Ser-D-Phe-Arg-Trp-Pen)-NH₂;
(SEQ ID NO: 675)
Ac-D-Lys-c(hCys-Ser-D-Phe-Arg-Trp-Pen)-NH₂;
(SEQ ID NO: 682)
Ac-D-Arg-c(hCys-Thr-D-Phe-Arg-Trp-Pen)-NH₂;
(SEQ ID NO: 686)
Ac-Lys-c(hCys-Thr-D-Phe-Arg-Trp-Pen)-NH₂;
(SEQ ID NO: 690)
Ac-D-Lys-c(hCys-Thr-D-Phe-Arg-Trp-Pen)-NH₂;
and
(SEQ ID NO: 692)
Ac-D-Lys-c(hCys-Thr-D-Phe-Arg-Trp-Pen)-NH₂.

61. The method of claim 1, wherein the MC4R agonist is a compound of Formula (XII-c): [chemical structure]
or a pharmaceutically acceptable salt thereof, wherein:
A₁ is Hor Ac;
A₂ is OH or NH₂;
Yyy is L-Arg or D-Arg;
Aaa and Bbb are selected from Cys, hCys, and Pen capable of
establishing a disulfide bridge; or Glu, Asp, Lys, Orn, Dpr, and Dbu capable of establishing a lactam bridge; and
Xxx is Asn, Gln, Ser, or Thr.

62. The method of claim 61, wherein the MC4R agonist of Formula (XII-c) is selected from:
(SEQ ID NO: 629)
Ac-Arg-c(hCys-Asn-D-Phe-Arg-Trp-Pen)-NH₂;
(SEQ ID NO: 630)
Ac-Arg-c(hCys-Gln-D-Phe-Arg-Trp-Pen)-NH₂;
(SEQ ID NO: 631)
Ac-Arg-c(hCys-Ser-D-Phe-Arg-Trp-Pen)-NH₂;
(SEQ ID NO: 632)
Ac-Arg-c(hCys-Thr-D-Phe-Arg-Trp-Pen)-NH₂;
(SEQ ID NO: 633)
Ac-Arg-c(Glu-Gln-D-Phe-Arg-Trp-Dpr)-NH₂;
(SEQ ID NO: 634)
Ac-Arg-c(hCys-Asn-D-Phe-Arg-Trp-Pen)-OH;
(SEQ ID NO: 635)
H-Arg-c(hCys-Asn-D-Phe-Arg-Trp-Pen)-NH₂;
(SEQ ID NO: 636)
H-Arg-c(hCys-Asn-D-Phe-Arg-Trp-Pen)-OH;
(SEQ ID NO: 637)
Ac-D-Arg-c(hCys-Asn-D-Phe-Arg-Trp-Pen)-NH₂;
(SEQ ID NO: 638)
H-D-Arg-c(hCys-Asn-D-Phe-Arg-Trp-Pen)-NH₂;
(SEQ ID NO: 639)
Ac-D-Arg-c(hCys-Asn-D-Phe-Arg-Trp-Pen)-OH;
(SEQ ID NO: 640)
H-D-Arg-c(hCys-Asn-D-Phe-Arg-Trp-Pen)-OH;
(SEQ ID NO: 649)
Ac-Arg-c(hCys-Gln-D-Phe-Arg-Trp-Pen)-OH;
(SEQ ID NO: 650)
H-Arg-c(hCys-Gln-D-Phe-Arg-Trp-Pen)-NH₂;
(SEQ ID NO: 651)
H-Arg-c(hCys-Gln-D-Phe-Arg-Trp-Pen)-OH;
(SEQ ID NO: 652)
Ac-D-Arg-c(hCys-Gln-D-Phe-Arg-Trp-Pen)-NH₂;
(SEQ ID NO: 653)
H-D-Arg-c(hCys-Gln-D-Phe-Arg-Trp-Pen)-NH₂;
(SEQ ID NO: 654)
Ac-D-Arg-c(hCys-Gln-D-Phe-Arg-Trp-Pen)-OH;
(SEQ ID NO: 655)
H-D-Arg-c(hCys-Gln-D-Phe-Arg-Trp-Pen)-OH;
(SEQ ID NO: 664)
Ac-Arg-c(hCys-Ser-D-Phe-Arg-Trp-Pen)-OH;
(SEQ ID NO: 665)
H-Arg-c(hCys-Ser-D-Phe-Arg-Trp-Pen)-NH₂;
(SEQ ID NO: 666)
H-Arg-c(hCys-Ser-D-Phe-Arg-Trp-Pen)-OH;
(SEQ ID NO: 667)
Ac-D-Arg-c(hCys-Ser-D-Phe-Arg-Trp-Pen)-NH₂;
(SEQ ID NO: 668)
H-D-Arg-c(hCys-Ser-D-Phe-Arg-Trp-Pen)-NH₂;
(SEQ ID NO: 669)
Ac-D-Arg-c(hCys-Ser-D-Phe-Arg-Trp-Pen)-OH;
(SEQ ID NO: 670)
H-D-Arg-c(hCys-Ser-D-Phe-Arg-Trp-Pen)-OH;
(SEQ ID NO: 679)
Ac-Arg-c(hCys-Thr-D-Phe-Arg-Trp-Pen)-OH;
(SEQ ID NO: 680)
H-Arg-c(hCys-Thr-D-Phe-Arg-Trp-Pen)-NH₂;
(SEQ ID NO: 681)
H-Arg-c(hCys-Thr-D-Phe-Arg-Trp-Pen)-OH;
(SEQ ID NO: 682)
Ac-D-Arg-c(hCys-Thr-D-Phe-Arg-Trp-Pen)-NH₂;
(SEQ ID NO: 683)
H-D-Arg-c(hCys-Thr-D-Phe-Arg-Trp-Pen)-NH₂;
(SEQ ID NO: 684)
Ac-D-Arg-c(hCys-Thr-D-Phe-Arg-Trp-Pen)-OH;
and
(SEQ ID NO: 685)
H-D-Arg-c(hCys-Thr-D-Phe-Arg-Trp-Pen)-OH.

63. The method of claim 1, wherein after administration of the MC4R agonist, the subject experiences a reduction in BMI of between 5-10, e.g., after 16 weeks, relative to the baseline BMI, e.g., the BMI of the subject prior to administration of the MC4R agonist.

64. The method of claim 63, wherein the subject is a pediatric subject between ages 6 and 18.

65. The method of claim 1, wherein after administration of the MC4R agonist, the subject experiences a reduction in weight of between about 5 kg to about 15 kg, e.g., after 16 weeks, relative to the baseline weight, e.g., the weight of the subject prior to administration of the MC4R agonist.

66. The method of claim 65, wherein the subject is a pediatric subject between ages 6 and 18.
